United States Patent Application Publication US 2026/0191916 A1 - sequence listing, part 47

SEQ ID NO: 212 - DNA, 2108992 bp, Streptococcus parasanguinis
  source 1..2108992: mol_type = genomic DNA
gtgtcacaagaagagcaattttggtctcgttttttagaattagcccaattacaactaaaagatagtgcctatgatttttttgtcgccgattcaaaattagtcaaaatcgatggagagacggctaccatttatcttgatgggaattataaagaattattttgggaaacaaatctaaaaaatgctttgatcacagccagctttgaagtctacaatacagatttgaagttccatttcgtttttgaagataccgaagaaattcctagtagtcatagcagtgagaataggagattatcttcaggtagcttaacaaccgaaccgttgcctaaaattgatacaggtctgaaatcaaagtacacctttgataattttgtgcaaggggatggaaatatttgggcgaaagcagcagcgcttgcagtttctgaaaatcttgcaacaacttacaaccctctctttatctatggtggaccagggcttggaaagactcacctattgaacgcaattggaaatcaaatcctagaaaatattccaaatgcacgggttaagtatgtcccagcagaaacctttattaatgaatttttagaacaccttcgattaggagaaatgaagacgttcaagaatacctatcgaagtcttgatctcttactgatcgatgatatccagtcacttggtgggaagaaagtcacgactcaagaggaattttttaatacctttaatgccctccatagcgacaacaaacagattgttctaacaagcgatcgaagtccggatcatttagatagtcttgaagagcggctagttactcgtttcaaatggggactaacgcaaaatataacaccacctgattttgaaactcggattgctatcttacggaataaaattgaagatctagactatatttttcctaatgacacactagaatatctagctggtcagtttgattcaaatgtccgagacttagaaggtgccttaaatgatatttctttaatggcgaaggttaagaaactaaaagaaattacgatcgatgttgcagctgaagctattcgagctcgtaaaaacgataatagcaagacgcttgtcatccccattgaaaaaattcaggaagcagttggagccttttatggagtcagtgtaaaagaaatcaaaggttctcgaagagttcagaatattgtcctagcacgacaagtggccatgtatctttcaagagagatgacggacaactcacttcctcgaatcggaaaagaattcggtgggaaagaccatacgactgtcattcatgcctatgaaaaaattaaaagtatggtcgacacagatgataatctacgactcgaaattcaaagtatcaagaaaaagttaaattaatctgtggataacttcctctaaacttctaggggttatgcacaatttttaaacaagtaacttttcaagtcatagacaggattctgagagttttccacaacttccacacaatctactattactattaacttactaatcataaaataaataaaaggaatgaccatgataaatttttctattaacaaaactttatttttacaagcattaaatactaccaaaagagcgatcagttcaaaaaatgctatcccaatcctttccacgattaaaattgatgtcactccagaaggagttgccttatctggatcgaatggccaaatttcaattgaaaactttatttctatcaaagatgaaaatgctggtttattggtgacctctccaggctctattttattggaagcaactttctttattaatgtggtttcaagtttaccagatgttactttagattttaaagagattgaacaaaaacaggttcttttaacaagtggaaaatcagaaattacacttaaaggaaaagatgcagatcaatatccacgtattcaagaaattgctgcaagtaatccattagttttggaaacaaaattattaaaacaattaattaatgaaacagcatttgcagcaagtgtacaagaaagtcgtccaattttgacaggtgttcactttgttttatcggataataaagagctaaaaacagtagcaacagactctcaccgtatgagtcaaaaagtgattacactggagaaaaatggagacaactttgatgttgtcatcccaagtcgctctcttcgtgaattcacctctgttttttctgatgatattgaaacagttgaggttttctttgctaacaatcaaattctatttagaagtgaacacattagtttttatacccgtttgctagaaggaaattatcctgatacagaccgtctcattccaacagaattcaatacagaggcaaccttcaatgtggccaaccttcgatttgcaatggagcgtgctcgtcttctttcaaatgcgactcaaaacggaacggttaaattagagttcaaaaatggagtggtttcttcccacgttcattcaccagaagttgggcgagtaaatgaagagatcgatacgagcgccgtttcaggagaggatttgtctattagctttaatccaacttatttgattgaagcgctcaaagctattgacagtgaacaagttgttattcgttttatttcttctgttagaccgtttacattggttccagaaggaaatgaacaagggttcattcaattgattacgccagttcgcacaaattaacaaaggtgaatcatgtatacgttaggtgattttgtagaaatgaaaaagcctcacgcttgtgtgattaaagaaacaggcaagaaggcaaatcgttgggaaattacgcgacttggtgcagacataaaaatcaagtgtagcaattgtgatcatgtggtcatgatgagtcgccatgattttgaacagaaaatgaagaaagtactataaaaggttcagtcacttatgtgaccgaaccttttcgattattttaattcttcaaattttccatttttaacttctttgaaaccaccctgtttcatcatatcaaaagttgatttgaagctgatatagtcgacttttttatctttttgtgtcgttactaatttcttttcaattagctgatctaagtctgccttttcataatttagtgttgttttttcaaccatataatcatctttatattcagcagaatgtgtgaatcctttgacatctttgtattcttcatcatatttatcgatcatttcctttaattgatctttcgtaactcctgcctctttgtaataaatagtagtggtggtttggttactgatcgctttatcacctttatgttctagtgtaatacgaacatctgttttcttttcttggttgattgcctgaagataggatttttgaacagattgttgtccacaagctccaagaagaaagagcgtaaagatagcgattaaagaaagaaaaatagatttccatatttgttttttcatctgaaaaactcctttattcattgttaaatagagtataccatatttatctttttagaacgttacagtttgatgaaaaaatctagtttcaaaggtgatgaaatatttcatttttcatcacttgtcttttgaattatgttataatgaaagagattgaaatttgaacggagaaaaagaaaaatggcattaacagcaggtatcgttgggttaccaaatgttggtaaatcaaccctatttaacgcaattacaaaagcaggagcagaggccgcaaactatccctttgcaaccattgatccaaacgttgggatggtagaagttccagatgaacgcctccaaaaattgacggaaatgattactcctaagaagacagttccgactacttttgaatttacagatattgctgggattgtgaaaggggcttctaagggagaaggacttggtaataaattcttggccaatatccgtgaagtagatgccattgttcatgtggtacgtgcttttgatgatgaaaatgtcatgcgggagcaaggtcgtgaagatgcctttgttgatccactagcagatattgataccatcaatttagaattaattttagccgacttagagtctgtcaataaacgctacgcgcgtgtagaaaaaatcgctcgtacacaaaaagataaggattctgttgcggaatttaatgttctacaaaaaatcaaaccagttcttgaagatggtaaatcagctcggaccattgaattcactgaggaagaacaaaaagtagtgaaaggactttttcttttgactaccaaaccagttctttatgtagccaatgtggatgaagatgttgttgcagatccagattctatcgaatatgtgaagcaaattcgtgactttgcggcaacagagaatgcggaagtcgtggtgatttctgcgcgtgctgaggaagaaatttctgagttagatgatgcagataaacaagaatttttagaggcgattggcctaacagagtctggagttgataaactcacgcgtgcagcttaccacttgttgggacttggcacttatttcacagctggtgaaaaagaagtgcgtgcttggaccttcaaacgtggcatgaaagcacctcaagctgctggaatcatccactctgattttgaaaaaggatttattcgtgccgtgaccatgtcctatgatgatttggttaaatacggttctgaaaaggctgtaaaagaagcaggacgcttgcgcgaagaaggaaaagaatatgttgtccaagatggggacatcatggaattccgttttaatgtataagagagttaaaaagatgtaaaggttggaaaaaatatttccaacccttttagtgttttgaaaggaaagagatgacgaaattaattgttggattgggaaatccaggtgataagtattttgaaaccaaacacaatgtaggctttatgttagttgatcaaatggcaaagtctttaaatcttactttctcccatgataagatttttcaagctgatatcgcttcaacatttttgaatggcgaaaaggtctattttgtaaagccaaccactttcatgaatgagagtggaaaagcggtccatgcccttctgacttattatggtctggatattgaagatcttttggttatttacgatgatttagatatggaagttggtaagattcgtcttcgagcgaaaggatcagcgggaggtcataacggaatcaaatcgattattaatcatattggaactcagactttttatcgaattaagattggaattggaagacctaagcagggcatgtcagtggttcatcatgtcttaggaaaatttgataaagacgattacatcaccattctacaaacaatcgatcgagtagaagaagcggttaatgattacttggtagaagaaaattttgaaagaagcatgcagaaatacaacgggtaagtagatgaatgtaattgatttagtgagtcaaaactccaaccttctatcctggcaacaaggtttgcaaaaaaataatagggaattgatcttaggattgtctgcgaccacaaaggctattgtaatggcttcagcctttgattctattgaaaaagcagtcctcatcacttccagttataacgaagcagaacgattagccagtgattttattgccttacttggagaagacaaagtccatacatttttgggagatgataaccctttagcagaatttgtttttgcttcacaagaaaggcaatttgcacgattagaggctttgaactttttatgtcaagaagatcgtcaaggtatccttgtgaccaatgtgagtggtataaaactactattaccttctcctaaagtttttacatctagtatttttaaattgaaggttggtcaagaaatagacttaactactctgagtgaaacattacagaagattggctatcaaaaggtgagccaagttttgcaacagggagagtttagtctacgaggagatattttagatatctttgagatcgaacaactccaaccctatcggattgaatttttcggagatgagattgatggaattcgaatctttgacccagaaagtcagcgttctgttgaaaatgttgaagaagttcaactgaaggcagtgagtgatctattgttgcaagaggaagattttatccgtggtcagcaacaaatagaacaattgcaagaacagagtgcgaatgaagaatttaaatcttatctagcagaaattctgggagatatttctcaaaggaaactccatccggatcttaaaaaatttattagtttcttttacgagaatcaatataccctattcgattatctccctaatcatactccagtctttctggatgattatcaaaaaatagcagatcaaatagcgagatttgaactagatacagctaatctcttgacggaagatttacataaaaatagagcttcttctcgccaagtgtattttgcagacaccagtacaacattacgaaaatatacgcctgcaacttatttttcaaactttcaaaaaggattgggaaatctgaagtttgatcatttgtatcaattcaatcaatatcccatgcaggagttttttggacaatttgatttactaaaagaggaaattgaacggtatcgaaaatcaaactatactgttattgtccaagcaacttctcatcacaatcttcaacagctccataaaaatttagaagagtatggaattcgattagattatattgatggggatacgatcattcctcaagctagtcaattagtcgttggaggattagctcacggttttcaatttgttgatgaaaaaattgtctacattacagaatcagagatttatcagaaaaagatcaaacgaaagattcgcaggcaaaatatttccaatgcagaacgcctaaaaaattataatgaactggaaaaaggggactatgttgttcaccaagttcatggtattggtcaatatttgggaattgaaacgattgaaatttcgggtgtccatcgtgattatgtttcaattcaatatcaaaatggagatcgcatctcgattcctgtcgatcagattcagatgttgtccaaatacgttgcaagtgatggaaaaacgccaaaaattaacaagttaaatgatgggcgtttccaaaaaacgaagcaaaaagttcagacccaggtggaggacattgcggatgatttgataaaactttatgcggagcgtagtcaattagaaggctttgcctattcccaagatgatgaaaatcaagaggcttttgaacaagattttccatatattgaaacagatgaccaattacgttccattgaagaaattaaaaaagatatggaatcgaatcgtccgatggaccgattgctggttggagacgtcggttttgggaaaacagaggtcgctatgcgagcagcctttaaggcagtaaatgatcataaacaagtagcagtgctggttcctaccactgttcttgcccaacaacattatgccaattttaaggagcgttttgaatcttttgcagtagaggttgctgttttaagccgtttccagagtaaggcagagcagaaagaaacgcttgaaaagttgaaaaaaggacgagtggatattattattggaactcaccggctcttgtccaaagatgttgttttttcagacttaggcttaatcgtgatcgatgaagaacaacgttttggagtgaagcacaaagaaaccttgaaagaattgaaaaaaaaggtggatgtgcttaccttgacagctacccctatacctcgaactcttcatatgtctatgctaggaattcgagatttgtcagtcatcgaaacacctccgaccaatcggtatcctgtgcaaacttttgtattagagaccaatccaaccattattcgagacgctgtgttgcgggagatggatcgtggaggacaagtgtactatctttacaacaaggtagatacaattgaacaaaaggtgtctgaattaaaagagttgattccagaggcttcgattggctttgttcatggtcagatgagtgaggttcgcttagaaaataccctgttggacttcattaatggcgaatacgatgtcttagtgacgacaaccattattgagacaggtgtggatattccaaatgctaatacactctttattgaaaatgcggatcatatgggactttcaactctttatcaactaagaggtcgtgtgggacgaagcaatcgaattgcttatgcttatttgatgtatcgtccagacaaatctcttacagaagtgtctgaaaaacgcttagaagctattaagggttttactgagttggggtctggctttaaaattgctatgcgagatttatcgatccgtggagcagggaatatccttggagcttctcaatctggtttcatcgattcagttggttttgaaatgtattctcaattgttagaagaagctattgctaagaaacaaggccaagagcatcgtaggcaaaagagcaatgcagagttgaaccttcaaatagatgcgtatttacctaatgaatatatttcagatcaacgtcaaaaaattgaaatttacaaacaaattcgtgaaatgaattctgcgacagactatgagtacttgcaagatgaattgatcgatcgttttggagaatacccagatgttgtcgcctacctacttgaaattggtttagtgaaagcttacttggatcaagtctttgtccgtcttgttgagagaaaacaacaaaaagtgacagtgaaatttgaacctattgccaaacaactgtttttaacacaggattatttcaaagctctgtcaatgacacagttaaaggcacagattgcagaagaaaagggattgattgaagtgatcttcgatattcgaaataagaaagattttgaaattttagaagctctgaagcaatttggtcaaaccttattggaaattaaacaggaaaaaaaagaggactagcagttcttagctcatttttcgcattttatgtataaaaaatgttacaatactatgttagaggtgacagtatgagattagataaatatttaaaagtttctcgcattattaagcgtcgtcctgttgcaaaggaagttgcagataaagggcgaatcaaagtcaatggagtattagccaaaagttcaacggatttgaaagtgaatgatcaaattgaagttcgttttggaaataaagtattgacggttaaagtcttggaaatgttggatagtacaaaaaaagaagatgcatccaaaatgtacgaaataattagtgaaacaaggatagaagaagatgcctaaaaatatcgttcaaatgaacaataaatatatcaaagacgaaagtcagcgaaaacgttttttagaagaagaaagaaaaaaacgcaatcgttttctagggctcgttttgatattggtcatgttactgtttattcttccaacttataatttagcccagagctatcaatcgctacaagataaaaaagaacaatacaaacagttggaaaaagagtataaagaaacaagtgaacaaaaagaataccaacaagacatcgctaaaaaattaaaagacgatgattatgcaacaaaatatgcacgcgctaagtattctttttcaaaagatggtgaatatgtttataccatcccagatttactcccccaataaccgatggaaaatatcttacaaacagttaaacaatttcttgaattttcggatgaaaaattagaggaattaaaaaagaaaaaccaaatgattaaacttcaaaaggatgaaaaggaaaggaatacaggtgtctaaacgatttctgctcctattgttagttccaattttatttattgggtctcaagcagcgagtgtcgagcagtctgagtcttctcagacaatagctcatccatcagaactttatttttcttcaattccagcgaaccctaatatctatcgcaaaatttctgttttttctgatcctcagttgaaaaaagcaaaaggagaaattcttcccaacacatcgtttacaatcgaacaactctttgtaaatgatgaagggaaagctgtatttaaaatagcagataaaggatatgtattagcagattcttctgtcattttttctgatgttgtacaagaaacacaagaaaaaaaacaagacatgtggctaaaacctggttttaaagtgtatgaccgacccttaataaatggtgcaaaagaaaaaaatacacctctttctccttatacaaaagtgacagtcttacgtacagctaagactttacgagatgagtttgtggagattgaaggtcagggctgggtgaacaaggcattcgttactgaaaaagataatcgaatggaaaaagttcaggacttgttaaatagtaaatacaattctccttcatatggaatctatgtaaaacaattagagactggaaatactgctggaatcaatccgcaaaaagaaatgtattctgccagtgtaacgaaattaccatacttgtactacgtccaagaacagctcaataaaaaagccatttctccaactacaacctacaaatatattccagaagtcaatgatttcaaaggaggctatgaaccagaaggaagtggtagtctttcaaaaacaccagatggaaaagaatatagtgttcaagagttgatagataagattgcaaaagaatcagataatgttggacataatatcttgaattattatgtcactcatcaatcagatcaagatttccaaaaaacattggataaaattgcaaagaaacattgggatgttaaaaaaagagaagcatccgctgaaatggctggcaatgtcatggaggctgtctatcaacaaaatggccctattattgatgcgctctcctctacaaaatatgataatcaacggattgcgcgtgaccttccagtaaaagttgctcataaaattggagatgcctatgattttagacatgatgttgcgattgtatacacaaattcaccctatgtaatagctatttttacagatcattcgaattatgatacgatttccaacatttcaaaagatatctatgaggtattgaaataatggaaaagcgatttttagagttttgtgaaaaacaagatctatttactccccatcgccgtgttttggttgccttatctggtggattggattcaatgaatctgtatgaacttttatataagaataaagaacgattgaaaatccatctggtactcgctcatgtcaatcatggacaaagaccagaatcggatttagaagaaagtgaacttcgaacgctagctgataggcgagaaacacgtatccatgtggctcactattcgggtgattttacagaagcaaaggctcgtacctttcgttatgatttttttaaacagattatggagaaagaggattgcaccgctttagtaacaggtcatcatgcaaacgatcaagctgaaacaactttcatgcgcttgatacgaggaacaaaattacgccatttaagtggcattcctgtacgccaaccatttggcaagggtgaattaatccgtcctttgttaacttttaccaaagatgagttgatgaaaatccctcactttgaagacagtagcaatgactcacaggactattttcgaaatcgtgtacgccatcaataccttcctgaatttgaaaaagaaaatcctcaaatgcaagcaagtcttcgttatttagcagaggaagtgactcattggcaccaagcactgaaagaattgactagcgagttaagcattcaagatttagcttcttttagaacgtattctcattctgtacaatcattcttattagaagagtatctggcacaatttccagatttgcaacttggtagggtacagtttcaagaattattaaatttactgcgaaaaaaaagaaattgcgttcattttttaaagtcgaattatgaactacatcaagaatatgatttctttgaaatacaaaaaatcagtcaaaagtcggatgaccaccctctcccatttttgttagaatttgggaatatctttgaaattgcaaattataaactatcttttggacaaccattagtaggggaaaatgtagaaattctttctgtttcacgcgaaactcccatcttaattagaaggagaaaggaaggagatcagctacttgttaatggccaccatcaaaaattaagacggtggtttatcaaccataaaattccaatttctcttcggcaaaaggctctcattatagaacaaaatcataatattctttctgtagtgggattggtaacgagtgatttgagtaagccctcaaaaagtggtataataaaagatagtctttatattcaaaaaatagataggtaaaaacatgttagaaaaagatataaaaaaagtattggtttcacatgatgaaattgtagaagcagcaaagaaattgggtgaaactctcacaaaagagtaccaaggaaaaaatccaatttttgttggaattttgaaaggctctgttccatttatggcagagttgatcaaccacgtggatacacatattgaattggattttatgctggtttcaagttatcatggtggtacagcaagctcaggtatcattaatattatcaaggatatcgaccaagatattactggtagagatattttatttgtagaagatattatcgatacaggtaaaaccctcaaaaatctaaaagaactctttgaagaacgaaatgcagcatctgtgaagattgctaccttactggataaacctgaaggacgtttggttgagatcgaagcagattacacctgctttacgattccaaatgagtttgttgtaggatatggtttagactatgatgaaaattatcgtaacctaccctatgttggtgtattaaaagaggaagtgtactcaaaatagaggagactagatgaataacagaaaaaataacggttttgttcgaaatccatttctgtatttgttgattattgtagcggctgtgacaggattccagtacttttttgcgggtaatggagttggtcaaagtcagcaaatcaactacacagaattggtcaaagaaattaaaaatgacaatgtaaaaacgatcagttaccaaccaaatggtagtgtgattgaaattgcagggacctataataaagctaaagaatcaaaagatgatactggaattcaattttttaccccaagtgttcaaaaagtatctcgctttactagtgtcatccttccatctgatatcaccgtcaatgaattacaaaaattagcagctgatcacaaagcagaaatcaccatcaagcgtgagagctcaagtggcatgtggataaccattctcacttcaattgttccatttgttatcgtcatgttcttcttcttctctatgatgaaccaaggtggtggcggaggtgccagaggtgcgatgaattttggtcgcaataaagcccgcgctgctaataaagaagatattaaagttcgtttttcagatgtagcaggagctgaagaagaaaaacaagaacttgttgaagttgttgaatttttaaaagatccaaaacgctttactaaattgggtgcaagaatcccagcaggtgtgcttcttgaaggccctccgggaactggtaaaactcttttagcaaaagcagtagctggtgaagctggagtgccattcttcagtatctctggttctgacttcgttgaaatgtttgtcggagtcggcgctagccgggttcgttcactttttgaagatgctaaaaaagcagctccagctattatctttatcgatgaaattgatgctgttgggcgccaacgtggtgtaggtcttggtggtggaaatgatgaacgtgaacaaaccctcaaccagctcttgattgagatggatggttttgaaggtaacgaaggaatcattgttatcgcagcaactaaccgttctgatgtccttgaccctgcccttcttcgtcctggccgttttgaccgtaaagtattagttggacgtccagatgtgaagggtcgtgaggcaattcttcgtgttcatgctaagaataaaccacttgctcaggatgtggacttgaaattggttgctcaacaaacaccaggatttgtcggtgctgatctcgaaaatgttttgaatgaagcagccttggttgcagctcgtcgaaataaaaaagtaattgatgctgctgatatcgatgaagcagaagatcgtgttattgcaggtccatctaagaaagatcggacgatttcacaaaaagaacgtgaaatggttgcttatcacgaagctggtcatacaatcgttggtttggtcttatcaaatgctcgtgtggttcataaagttaccattgttccacgtggtcgtgcaggcggttatatgattgcccttcctaaagaagatcaaatgttactttctaaagaagatatgaaagaacaattagctgggctcatgggaggacgtgttgccgaagaaattattttcaattcgcaaacaacgggtgcttcaaatgactttgaacaagctacccaaatggcgcgtgcaatggtaacagaatatggtatgagtgaaaaacttggaccagtccaatatgaaggaaatcatgcgatgtttggtgctcaaagcccacaaaaaatgatttcagaacaaacagcttacgaaattgatgaagaagttcgtggtttgttgaatgaagcccgtaataaagcagcagaaattattcaaggaaatagagaaacgcataaactaattgcggaagctctattaaaatatgaaaccttggatagtgttcaaattaaatcattatatgaaacaggaaaaatgcctgaaaattcagagcatgaattagaagaagaagcaaaacctctatcatatgatgaaattaagtcaaaattagaagaaaacaactaattcaaaagaaggaaaatatttccttcttttttattaaaaaagtgttgacagagtaaaaatattctgtataatagaatatgttgtaaaaatggtccgttggtcaaggggttaagacaccgccttttcacggcggtaacacgggttcgaatcccgtacggactatcgataaactgtcaccaagtggcagttttttttgtgtatttgaacaaaatagtcaaaaataataaccaaatagttaaaaaaacgtgcagaatagaaaaaaagtccaatgagcttctttatttttataaaatacagataaaagtaaaggagagcttatggaatttaataaaatgtatcaaaaagtaaaatatatcgtaagaaaatgtgaaaaagagtattatattcaattatgggaaaaggatgattgggaacaagaaggtcagctaactctgtttgaactttatcaaaaaaatcctgaaattgaaacaaatgaagaattactttatacatatttcaaaacaaaatttagaaatcatattaaagataaaataagacaacaggaaagtgataagagaaaaattaatagacttccatatattgaaattggagaaattagtcacagaatttcatcaagaaaaatatatttagatgagctggttgttctgagagatgcattaaaacgttttaaagaaaaattaacagtaaaagaaaaagaacaatatgaagcattactagcaaacagaagatgtctaggaaaaacaaaaatgaaaaagaaattagagaactatctaaaggattttaaaaattcaatttaagaactgaaagttgacagtgtataaatgaactttcaaaaaaataaaattttttgagaaaaagtattgacagtaaggtaaggtcatgatatactaatatagttgtcgcgcgagagcgacaaagacctttgaaaactgaacaagacgaaccaatgtgcagggcgctataactaaggttatagtaactgaacaataaaaaaacaataaatctgtcagtgacagaatgagtttaagacaaacaattattttaatgagagtttgatcctggctcaggatgaacgctggcggcgtgcctaatacatgcaagtagaacgctgaagcttggtgcttgcaccgagcggatgagttgcgaacgggtgagtaacgcgtaggtaacctgcctcttagcgggggataactattggaaacgatagctaataccgcataaaagtcgacatcgcatgatgttgacttgaaaggtgcaattgcatcactaagagatggacctgcgttgtattagctagttggtgaggtaacggctcaccaaggcgacgatacatagccgacctgagagggtgatcggccacactgggactgagacacggcccagactcctacgggaggcagcagtagggaatcttcggcaatgggggcaaccctgaccgagcaacgccgcgtgagtgaagaaggttttcggatcgtaaagctctgttgtaagagaagaacgagtgtgagagtggaaagttcacactgtgacggtaacttaccagaaagggacggctaactacgtgccagcagccgcggtaatacgtaggtcccgagcgttatccggatttattgggcgtaaagcgagcgcaggcggttagataagtctgaagttaaaggctgtggcttaaccatagtacgctttggaaactgtttaacttgagtgcagaaggggagagtggaattccatgtgtagcggtgaaatgcgtagatatatggaggaacaccggtggcgaaagcggctctctggtctgtaactgacgctgaggctcgaaagcgtggggagcaaacaggattagataccctggtagtccacgccgtaaacgatgagtgctaggtgttgggtcctttccgggactcagtgccgcagctaacgcattaagcactccgcctggggagtacgaccgcaaggttgaaactcaaaggaattgacgggggcccgcacaagcggtggagcatgtggtttaattcgaagcaacgcgaagaaccttaccaggtcttgacatccctctgaccgctctagagatagagttttccttcgggacagaggtgacaggtggtgcatggttgtcgtcagctcgtgtcgtgagatgttgggttaagtcccgcaacgagcgcaacccctattgttagttgccatcattgagttgggcactctagcgagactgccggtaataaaccggaggaaggtggggatgacgtcaaatcatcatgccccttatgacctgggctacacacgtgctacaatggctggtacaacgagtcgcgagtcggtgacggcaagctaatctcttaaagccagtctcagttcggattgtaggctgcaactcgcctacatgaagtcggaatcgctagtaatcgcggatcagcacgccgcggtgaatacgttcccgggccttgtacacaccgcccgtcacaccacgagagtttgtaacacccgaagtcggtgaggtaaccgtaaggagccagccgcctaaggtgggatagatgattggggtgaagtcgtaacaaggtagccgtatcggaaggtgcggctggatcacctcctttctaaggaaatggaaacctgtacgttggtcttgtttagttttgagaggtcttgtggggccttagctcagctgggagagcgcctgctttgcacgcaggaggtcagcggttcgatcccgctaggctccattaacactgtaagggtgttaagattgaacattgaaaattgaatatctatatcaaatagtaacaagaaaataaaccgaaacgctgtaaatatttaaagagtttaggtcgcaagaccaaaataaggttaagttaataagggcgcacggtggatgccttggcactagaagccgaagaaggacgtgacaaacgacgaaatgctttggggagctgtaagtaagcgacgatccagagatgtccgaatgggggaacccactagctaatggctagtactcctatctgttaaggataggtagaggaagacgcagtgaactgaaacatctaagtagctgcaggaagagaaagcaaaagcgattgcctgagtagcggcgagcgaaacggcaggagggcaaaccgaagagtttactcttcggggttgtaggactgcaatgtggacttaaagaatatagaagaatgacatgggaaggtcagccaaagagagtaagagcctcgtattcgaaatagtctttatacctagcagtatcctgagtacggcgggacacgagaaatcccgtcggaatctgggaggaccatctcccaaccctaaatactctctagtgaccgatagtgaaccagtaccgtgagggaaaggtgaaaagcaccccgggaggggagtgaaatagaacctgaaaccgtgtgcctacaacaagttcgagcccgttaatgggtgagagcgtgccttttgtagaatgaaccggcgagttacgatatgatgcgaggttaagttgaagagacggagccgtagggaaaccgagtctgaatagggcgtcttagtattatgtcgtagacccgaaaccatgtgacctacccatgagcaggttgaaggtgaggtaaaactcactggaggaccgaaccagggcacgttgaaaagtgcttggatgacttgtgggtagcggagaaattccaaacgaacttggagatagctggttctctccgaaatagctttagggctagcgtcgacattaagattcttggaggtagagcactgtttgggtgaggggtccatcccggattaccaatctcagataaactccgaatgccaatgaattatggtcggcagtcagactgcgagtgctaagatccgtagtcgaaagggaaacagcccagaccaccagctaaggtcccaaaataattgttaagtggaaaaggatgtggggttgcacagacaactaggatgttagcttagaagcagctattcattcaaagagtgcgtaatagctcactagtcgagtgaccctgcgccgaaaatgtaccggggctaaaacaatttaccgaagctgtggatacctttataggtatggtaggagagcgttctatgtgtggagaaggtgtaccgtgaggagcgctggaacgcatagaagtgagaatgccggtatgagtagcgaaagacaggtgagaatcctgtccaccgtaagactaaggtttccaggggaaggctcgtccgccctgggttagtcgggacctaaggagagaccgaaaggtgtatccgatggacaacaggttgatattcctgtactagagtatgtagtgaaggagggacgcagtaggctaactaaagcgtgcgactggaagtgcacgtctaagcagtgaggtgtgaattgagttaaatgcttaattctataacattgagctgtgatggggagcgaagtttagtagcgaagttagtgacgtcacactgccaagaaaagcttctagcgtttaaacatactctacccgtaccgcaaaccgacacaggtagtcgaggcgagtagcctcaggtgagcgagagaactctcgttaaggaactcggcaaaatgaccccgtaacttcgggagaaggggtgctggctttcagtcagccgcagtgaataggcccaagcaactgtttatcaaaaacacagctctctgctaaatcgtaagatgatgtatagggggtgacgcctgcccggtgctggaaggttaagaggagtgcttagcgtaagcgaaggtatgaattgaagccccagtaaacggcggccgtaactataacggtcctaaggtagcgaaattccttgtcgggtaagttccgacccgcacgaaaggcgtaatgatttgggcactgtctcaacgagagactcggtgaaattttagtacctgtgaagatgcaggttacccgcgacaggacggaaagaccccatggagctttactgcagtttgatattgagtgtctgtgccacatgtacaggataggtaggagccattgagatcgggacgccagtttcgatggaggcgttgttgggatactacccttgtgttatggccactctaacccggtaggttaatcatctacggagacagtgtctgacgggcagtttgactggggcggtcgcctcctaaaaggtaacggaggcgcccaaaggttccctcagaatggttggaaatcattcgcagagtgtaaaggtataagggagcttgactgcgagagctacaactcgagcagggacgaaagtcgggcttagtgatccggtggttccgtatggaagggccatcgctcaacggataaaagctaccctggggataacaggcttatctcccccaagagttcacatcgacggggaggtttggcacctcgatgtcggctcgtcgcatcctggggctgtagtcggtcccaagggttgggctgttcgcccattaaagcggcacgcgagctgggttcagaacgtcgtgagacagttcggtccctatccgtcgcgggcgtaggaaatttgagaggatctgctcctagtacgagaggaccagagtggacttaccgctggtgtaccagttgtctcgccagaggcatcgctgggtagctatgtagggaagggataaacgctgaaagcatctaagtgtgaaacccacctcaagatgagatttcccatgattttatatcagtaagagccctgagagaagatcaggtagataggttaggagtggaagttgtgtgagcaatggagcggactaatactaatagctcgaggacttatccaaagagtcagaagatattgacaacgtgagtttaacttgttagaatatagatgttcaattttgaatgtttaatcattcagagttaagtgacgatagcctaggagatacacctgtacccatgccgaacacagcagttaagccctagaacgccggaagtagttgggggttgccccctgtgagataaggtagtcgcttagcaagagattgagcctagtagatactaggctcatttgggagtttagctcagctgggagagcatctgccttacaagcagagggtcagcggttcgatcccgttaactcccataggtcccgtagtgtagcggttatcacgtcgccctgtcacggcgaagatcgcgggttcgattcccgtcgggaccgttaagataatgaaaattattttaagactcgttagctcagttggtagagcaattgacttttaatcaatgggtcactggttcgagcccagtacgggtcatattttgcgggtttggcggaattggcagacgcaccagatttaggatctggcgctttacggcgtgggggttcaagtcccttaacccgcataagagaataataatgagccggcttagctcagttggtagagcatctgatttgtaatcagagggtcgcgtgttcaagtcatgtagccggcatttttttatataaagaaagcaatgcgaacgtagttcagtggtagaacaccaccttgccaaggtgggggtcgcgggttcgaatcccgtcgttcgcttgaggaggccggggtggcggaactggcagacgcacaggacttaaaatcctgcgattggtaacgatcgtaccggttcgattccggtcctcggcatagatttaggttggagaagaagcacccttagctcaactggatagagtacctgactacgaatcaggcggttagaggttcgactcctctagggtgcatggtcgcaaggctatgtagtaattgaataggaacgagcacccttagctcaactggatagagtacctgactacgaatcaggcggttagaggttcgactcctctagggtgcataaagcggtagctttagatcgggaagtagctcagcttggtagagtacttggtttgggaccaaggtgtcgcaggttcgaatcctgtcttcccgatattatggcggtgtagctcagctggctagagcgtccggttcatacccgggaggtcgggggttcgatccccttcgccgctatattgttgatcttgttggacctttagctcagctggttagagctctcggctcataaccgagtggtcgtaggttcaagtcctacaaggtccattgttatcttggaggattacccaagtccggctgaagggaacggtcttgaaaaccgtcaggcgtgtaaaagcgtgcgtgggttcgaatcccacatcctccttaatattaacgcgggatggagcagctcggtagctcgtcgggctcataacccgaaggtcgtaggttcaaatcctgctcccgcaatttggctcggtagctcagttggtagagcaatggattgaagctccatgtgtcggcggttcgattccgtctcgcgccatttcttttaataataagcgggtgtagtttagtggtaaaactacagccttccaagctgttgtcgcgagttcgattctcgtcacccgctttgaacataggttctttaccaagtttttaacttgggcgcgtagctcaggtggttagagcgcacgcctgataagcgtgaggtcggtggttcgagtccactcgtgcccattttggagaattactcaagaggctgaagaggacggtttgctaaatcgttaggtcgggtaaccggcgcgggggttcgaatcccccattctccgtataatttccaagtttgagatgtcatctcaaactattttttatatttttgaaggttttgtctatgttcttgaatcgattctttaaaatttttagttttgtgtttgttttaactgtttcaggaattttatttctttttccatctgttagaacttcgattgttttaaaatcttctgatctattagctattgttgataaggcagtatcggtaccatttgttgttgtggaatctaaggcaaaggatttaaagaatttatctgaattaaatgatgaaaaccgttcgttaaaatcacgtctttatcaaaaggatattgatcagtcaaaacttaaccgtttggaatcagaaaatagagaattaaaggatttgatgtcaatcaagaattctgtatcgggttctaaacaagtcgttagtgagattattgaccgtaattatggttcgtgggatcaggaatttgttattgataaaggtagttcagatggaatttctgattctatgtttgttctttcgtctggtggcgtcattggtgtggtagaaagtatagagaaaaattctagcaaagtgaaattattagttgaagatactatttcttcacaacacctgacgtttaaaattgagagtcaaggtcaatctatttttgctttattaaatggttatgacgagaagacaggtgagtttcggttgttgcaaattggagatccagttgaaattaaaaaaggatctctggtttcaacaagtggtttaggaaaatataagagtagtgacttacctcttggtacagtgacttctactcaaaaggcatctgatcagttagggcaagaaattcgtgtgaaaccaaaggctaatttagatgtcaatcgttatgtactattgattggagagtagtgtgaaagtcatacgtaagtaccattttttccctttaatcttattcttatctttatttgttgacggacagatctcttttcttatttctcgtttctgtccaaactcttttgaacctacttcatttttatttctatatggttttatgttattgagtctctatttctctgagatagctagtatttggtggggagtcttctttggtttttgttttgatgtgtattttttacgcactataggaattgcctttctagtcttccctttgttacaggtgattttttatcggtgtaatcagattattttggtcaatcgattgactcgtttttttacatttttattaatgattctaatatttcagatttcaaccaatcttcttctgattatttttattggtataaaattcaactggattactctcattatccatcaaattgcgcctagtttaattttgaatgtggttctaatgatcgtattacagcctttacttgaaaagatttatttataaactcgaaataaaaatgtaacaatagcgtaatataaattttcaaaaaatttgttatactagttagtgtcttattagaaagggaaaatttatctaatgaagaaaaaattatttgccacaatcttattgagtacagttgctttatcacaaggtgctgttgtagcaggtgtatcagctgactcaacagatgataagattgctgctcaagataacaaaatcaatagtattaatcaacaacaacaaagtgcacaagctcaggtagatcaaatccaaggtcaagtatctgaaattaaacaacaacaagaaaatcttcaagctgaaaatgaccgtttgaatgaagaatctgaacgattgtcagctgagatcgatgagttgtcaaaaaatattgttgctcgtcaagaatcacttgcaaatcaagcacgtagtgctcaaacaactggaactgcaacaagctatattaatgcgattgttagctctggatctttgacagaagctatctcacgtatttctgctatgaatgaaattgcagatgctaacaacaaaatgttgcaagagcaaaaacgtgataaagaagatattgcacaaaaacaaaaagaaaacaacgacgctatcaatactgttattgcaaataaacagcaattagaagatgatgcgcaagctttgtcaactaaagaagctgagttgaaagtggcacaattgaatttggcagctgaaaaatcatctgctgaaaacgaaaagaacgctttgttgcaacaaaaagctgaagctgaaaaagcagcggcagcagcggcagcagctgaggcagcttaccgtgcaaaacaaaaagaacaacaagcagctgtaaaagcttctgctaatacaactcttcaagcacaagttcaggcagcagcacaaacacctgctgcaacaccagcggctgcacaaactcaagcagcagctcaacctgctgttcaaactcaagcagcagcagctccagcagctccagcagcaactgtttctcgtccaacttatagtacatctgcatcatcttatccagttggtgaatgtacatggggtgcgaagacattggctccatgggctggtgattactggggtaatggtggacaatgggcagcaagtgcagcggcagcaggattccgtacaggatctcaaccacaagttggtgccattgcatgttggaatgatggtggatatggacacgtagcagttgttacagccgttcaatctacaacgagcatccaagtctctgagtctaactataatggtatccgtagtattgggaactaccgtggttggtttaacccaacaacagcacaaggtactgttacttatatctatccaaactaagaattacactgaagcagaacatttgttctgcttcttttttgatagaatttaggtagtgatagattttgtagtttccataaattaatatttgaatatttgcttaaaaagcgataaaatggttacaggagaaatttgtgctgactgtacaatatggttttagattttactggaggaaatcatgtcattttctgatttaatgctctttgctttgtcgtcaaatcaagaattggctcaacgtgtgtctcgagaaatgggactaccgcttggaaagtcaacggttcgtcaattttctgatggagaaattcaggttaatattgaagaatcaatccgtgggaaagatgtttatattttgcaatccactagctcgccggttaacgataatctaatggaaattttgattatggtagatgcgttgaaacgggctagtgcgcaatccattaatgtggtgatgccatattacggctatgctcgtcaagaccggaaagctcgagctcgtgaaccaatcacttctaagttggtagccaatatgcttgaggttgctggtgttgatcgcctcttgacaattgatttgcacgccgctcagattcaaggtttctttgatattcctgttgaccacttgatgggtgcgcctttgatcgccgactattttgaacgtcgtgggatgattgggaaagactatgttgttgtcagtccagaccatggtggtgtgactcgtgctcgaaaattagctgaatttttgaagacaccgattgcgattattgataaacgtcgaagtgtcgataagatgaatacgagtgaagtgatgaatatcattgggagtgttgaaggcaagacttgtattttgattgatgatatgattgatacagctggtacaatctgtcatgccgcggacgcccttgcagaagcaggtgctgttgaagtttatgcgagctgtactcaccctgttttatcaggaccagcgatggacaatattcaaaaatcagccattaagaagttggtggtgttggatacgatttatctaccggaagatcgattaattgataagattgagcaaatttcgattgcgaaactccttgcagaggccattgttcgcattcacgaaaatcgccctctttctcctctatttgaaatcggaaatgccaaaaaatgttaacaataaggaggctgggtaactggcctcttttatttaggaggatatacaaatggaaatcagaaaatggttggaaaatctaaaaaaagaaaagaaacggaaaaaactggttcaagcagctaaagaactagaagcaaaggctgatcctagtttgcccaagaaacgattgccaaaaaatggggtggtgaaataggatagaaaagatttctattttttaaatacatttttatatatgaatagagtatttttccaagatggttttaaattcgtagttctatatctcaaatggatcaaaagattaaactttttttaaaaaataatggaaaaagtcttgacataggcagaatatcctagtatactagtcatagttacgaagtaacgaataatttttgaaaagaaaaaaggagataaaacaatgaaaaaagttttattatcatcagtagcagctcttgcagtatttgctgcagcagcaccagttcttgccgaaggtggagtcaacggtggagctaacaatcctagaggacctcaagatactgacgtcgcttcaaaatactatgatcaatctgaatttgtaagtgctcgtacagttgaagaataccttaacggtcacatggacgaaatcaaagctgaagcagcggctgatccagcagtagtagcagctaaagctgaatttgatgctgttgaaggtggttcacacctttacggagaaaagaaagcagcttatgaagcagcattcaatactgcattcttgaacgtacgtaacaaatatgtacaacaattccaaactgttcaaaacacagctaagaaaaaagaaggccgttactatatcttgaatgaaactccagaacaagctaacgctcgttacttgaaagaacatggaattaatccagaacaagctaacgcagacgcagctaaagcagacgcagctaaagctgacgcagctaaagcagaagaagcagctaaaaaagcagaagctggtaaagctggttcaaaacaagctggtaaagctcttccaaaaacaagcgcagttaaataatttgattattaattagctcgtaaaatatcactggaccttcgggttcagtgttattttttagaaaaaatcatcaagaggagatcaatcaatgaaaagagctggggaaaaaagttcaaataaattgggtcttgtaattgctgctcttgttgcagttgttgttcttgttgctggatttattttctttaatccatttggaggaactaagtcatctggcacggctaaaaaaacaactggaacaagctcaaccaagcaagaaactaaatatgaaccaagccaagaagaaaaagattacttgaaaaatcgttttgctcagttaacagctgttaaccctgaggcaattgcttatgtctatgcaccgggtactgagttggatgaacctgttgtacaaaccactgacaatgaaacttatttgaataagacgtttgatggtggaaatgaaccatacatggggacagtcttcatggatatggacaacaagaaagacttcagtgatcgtttgacttggttgtttggtcatgctcgtggtagtaaggtcggcgatcatcgcatgtttaatgatgtcaactactatgacaaacaagagtatttggaccaacatccgtatgttgtgattgagacaccagagcggaaatattattatgaagtaatgggattggtcattgtcccagaggacaccgctttctaccgtacaagctttactgatgacaatgattttacgacacaattgaagaatatctatgagtcagctcgtacgaagaatcctaatatcaagatcaaagcatctgataaatacttagtattgtcaacttgtcgtgaagaggatgaaaccattcgttctaacctctaccttcgtcaaattcctgattcagaaatgaaggattttgtggcaaaacatgcagatcaattgaaatacgtggcaacacgtggtcaacaataatgacttgaaagacttagcattgctaagtcttttttgcatggaaggattgttgaaatgtccattggtggtaagcaaaaggtggggatctggcttgttcttttgcgatggggtcctatttatagtataatgaatataagtgttttggaggtgttctatggatttaacgacacgttttaataaaaatctgaatcggattgaagtatctttgattcgtcagttcgatcaatcaatttcttccattcctggtgtcttgcgtttgactttgggggaaccggattttacaactcctgaacatgtaaaagaagcaggaaaggctgccattgatgcgaattttagccattacactgggatgagtggtttgctggctttgcgtgaggctgcgagtcagtttgtggcggataagtatgggattcactatcgtcctgaagatgaaatattggtgacgatcggtgcaacagaagccctgtctgcaaccttgacagcaatcttggaacctggagatgtagtgcttcttccggcaccagcttatcctggttatgaacccattgtgaatttggttggggcggagattgtcgaaattgatacaacagcagatcgttttgtcttgactcctgaaaagttggaaaaggcgattctagagcagggtaaaaaattgaaggctgttatactcaattatccagctaatccaacgggagttacttattcgcgcgaacagatggcgaaattggctgctgtcttaaaaaaatatgaagtctttgtgatttgtgatgaagtctattcagagttgacttatactggagaagcgcatgtctctatggcctcctttattcctgagcagaccattgttattaatggcttgtccaaatctcatgccatgacaggctggcgccttggctttgtctttgccccagctacattgacggctcaacttatcaagagccatcagtatttggttactgctgctggaaccatgaaccagtatgctgcgattgaggccttgactgctggtcgggatgatgcagagccgatgaagaaggaatatgtgaagcgtcgcgattatattattgaacagatgtccgcgcttgggtttgagatgattaagccagatggagctttttatatttttgctaaaatcccagctggttataatcaagattcctttgctttcttacaggattttgcgcgtgaaaaagcagttgctttcattcctggtgctgcttttggtcaatatggtgaaggctatgtgcgtttgtcgtatgcagccagcatggaggttatcaaggaagcaatgaaacgcttgaaggagtatatggaagaacatgctggagtcaattgagacccggggaattatcctgtataatcgggagtttcgtgaggatgacaagctggtcaaaatcttcacagagaagtcagggaagcggatgttttttgtgaaacatgcgggaaaatcacggttgaatcccatgttgcaacctttagtaacggcagatatgttgttgaaaatcaatgatgatgggttgagttatattgatgattttcaagatgtgcaggtttataagaaaattaatgcagatctttttgccctttcttatgcgacctatgttctggcgcttgcggatgcaagtattcaggataatcaggtggatccggccctgtttgcttttttggaaaagaccttgtctttgatggaagagggactggattatgaggttttgaccaatatttttgagattcagattctatcacgatttggagttatcttgaatctgcatgaatgctgtttctgtcatcgggttggacttccttttgattactcttttcggtatagtggggtcctttgtccggatcactatgatcaggatgagagacgagcccactggcatccgaatgttctctatttattggatcagtttcaagcagtacgattcagtgagttggagacgatttctctacaagcggagatgaaaacagctctgcgtcaggcaattgatcagttgtatgaggagtatgtagggatccatttaaaagctaaaaagtttatcgattccttgagtgattggggagcgattatgaaagattcatctggaggtgaaacatgaaaaaaattgcagtagatgcaatggggggcgataatgcacctcaagccttggtagaaggtgtgaatcaagccattcgtgattttgatgatattgagattgtcttgtatggtgatgagacaaaaatcaaaaactatttaacagtaacagagcgtgtatcgattgttcatacggaggaaaaaatcgattcagatgatgagccgacgcgtgctattcgtcggaagaagcaagcttctatggtcttggctgccaaggatgtgaaggctggagatgtagatgctatgttgtctgcggggaacacgggcgccttgttagcggcaggtttctttattgtcggtcgtatcaaaggagtggaacgtccaggtttgatgtctacacttccaacggttgatggtcgtgggtatgatatgctagacttaggggccaatgcggaaaatacaccagagcacttgcatcagtatgctgtgatgggatcctactatgctgaaaatgttcgtgggattcaaaaacctcgcgtgggtttattgaacaatgggacagaagctagtaaaggagatcctttgcgcaaggaaacctaccaattgttatctgaggatgagtcgattcattttgttggaaatgtggaagcgcgtgacttgatggatggcgttgctgatgtcgttgtggcggatggtttcacgggaaacgctgtcttgaaaacgatggaaggaacggcttttgggatcttgaagcaattgaaacaagcaattgccacaggaaactggaaggcgaaattaggagcttttctgctcaaggaccgtttgaaatcattgaagcaaaccttggatttctcagatgttggaggagcggtcttgtttggtcttcaagcacctgttgttaaaacgcatggttcgagtgatgccaaagctgtctatagcacgattcgtcagattcggaccatgttagagacagatgttgttggaaaatcagtgaaggaattatcgaaggaagggtaatgtatgagtaaacaaaacgaaattttagttacaattgaggaatttctcaaagatcgcaagggtccagactttcaagtatctttggaatctgacttacgtaaggatttacaggcggattctgttgaattgatggaatttattatcaatcttgaggatgaataccaaattgagattccggacaaggctattgatgaatttaacacagtaggggatgttgtcgactatatcgaaaaacgaactgctggtcactaatgaaaaagggatcgttcagagattattctggatgatctttttttctgtcctttttattcggattctgcttatattgtacggaattttattgaaaatacactttgtatgtgatagaatgaaggtgataaaatacgaaaggcgaacaaagtcatgaccaatcaactgatttatactggaaaagctaaggatatctatactactgaggacgaaaatgtgattaagtcggtctataaggaccaggcaaccatgcttaatggggctcgtaaggagactattaagggaaaaggtgtgctaaataatcagatttcgtctcttatttttgaaaaattgaatgctgcgggtgtagctactcactttatcgaacgtatttctgacacagaacaactcaacaagaaagtaaaaattattcctttggaggtggttcttcgtaatgtgactgcgggttctttctctaaacgttttggcgtggaagaaggtttggacttgaaaactccaatcgttgaattttactacaagaacgatgatttggatgacccattcatcaatgacgagcatgtgaagtttttggatattgctaacgacgaacaaattgcctatatcaaggaagaaacgcgtcgtatcaataaattgctgaaagattggtttgcacaaattggtcttcgtttgattgacttcaaattggaattcggttttgataaggatggcaaaatcatcttggcagatgaattctctccagataattgccgcctttgggatgctgaagggcaccatatggacaaggatgttttccgtagagatttgggtagcctaacggatgtatataaggttgtgttagagaagttgcaagacttgaaataatttggttgaaacggaaaaccttcgtcttcaagagcatttttgaatagaagtaaaggaaataaaatggataaacgtattttcgttgagaaaaaagctgattttcgtgtgaaatcggactctttagtaaaagaattgcagcataatcttcagttgaaaaccttgaaggatcttcggattgttcaggtttacgatgtttttggtttggcagaggacttgtttgcgcgtgcggaaaaacacatcttctctgagcaagtgaccgatactgttttggatgaagctacggttcagactgatcttgagaaatatgctttctttgcgatcgaaagcttacctggtcaatttgaccaacgtgcgacatcttcacaagaagctttgctgttgttgggtagttcaaatgacgtaacagtgaatacagcgcaattgtacttggttaacaaggatatcgatgcgaatgagttggaagctgttaaaaactaccttttgaacccagtggattctcgtttcaaagatatcactgttggcattgcgaaacaggatttctctgagtctgacaagaccattccaagcttggatttctttgaaaggtatacggcagaagattttgcacagtataaggctgagcaaggattggcaatggaagtggatgaccttctcttcattcaagattacttcaaatccattggacgtgtaccaactgagactgagcttaaggttttggatacttattggtctgaccactgccgtcacacaactttcgaaactgagttgaaaaacatcgacttctcagcttctaaatttgaaaaacaattgcaagcgacttatgacaagtatattgccatgcgtgatgagttgggacgtaccgaaaaacctcaaaccttgatggatatggcgactatttttggccgttatgagcgtgctaatggtcgtttggatgacatggaagtgtctgatgaaatcaatgcctgctcagttgaaattgaagtggatgtcaatggtgtcaaagaaccatggcttcttatgttcaagaatgaaacacacaaccacccaacggagattgaaccatttggtggagcggctacttgtatcggtggtgccattcgtgacccattgtcaggtcgttcatacgtttaccaagccatgcgtatctcaggtgctggtgatatcacggctccaatttcagaaactcgcgctggtaaattgccacaacaagtgatttctaaaacagcggctcatggttattcttcatatggtaaccaaattggtcttgcaacaacttatgttcgtgaatacttccacccaggtttcgttgctaagcgtatggagctaggtgcagttgtcggtgcggctcctaaggaaaatgttgtccgtgaaaaacctgaagcaggtgatgtgattatcttgcttggtggtaagactggacgtgacggtgtcggtggtgcgacaggttcttctaaagttcaaacggttgaatctgttgaaacagctggtgctgaggttcaaaaagggaatgccatcgaagaacgtaagattcaacgtcttttccgtaatggggaagtgacccgtctgatcaagaaatcaaatgactttggtgccggtggtgtctgtgtggcgatcggtgaattggcagatggtcttgaaattgatctagacaaagtgccattgaaataccaaggtttgaacggtacagaaattgctatctcagaatctcaagaacggatggctgtagtggttcgtccagaagatgtagatgctttcgttgctgaatgtaacaaagaaaatattgatgctgttgtcgttgcaacagtaactgaaaaaccaaatcttgtcatgcactggaatggtgaaaccatcgttgatttggaacgtcgtttccttgatacaaacggtgtacgtgtggttgtagatgctaaggtggttgacaaggatgtcaagcttccagaagaacgtcaaacatctgctgaaacccttgaagcggatactcttgaagtcttggctgacctgaaccatgccagtcaaaaagggttacaaaccatctttgatagctcggttggtcgttcaacagtcaatcacccacttggtggtcgctaccaaatcacaccaacggaagcttctgtacagaaattgccagtccaacatggcgtgacaacaactgcatctgttatggcgcaaggattcaacccttatgtagcagaatggtctccatatcatggcgctgcttatgcggtcatcgaagccacagctcgtttggttgctgctggtgcaaactggtctaaggctcgtttctcttatcaggaatacttcgagcgtatggataaacgagcagagcgttttggtcaaccagtctcagctctccttggatcaatcgaagctcagattcaacttggtttgccatctatcggtggtaaagactcgatgtctggtacctttgaagaattgacagtaccaccaaccttggttgcttttggggtcacaactgcagatagccgtaagattctttctccagaattcaaagctgctggtgaaaatatttactacattcctggtcaagctttggcacaagaaattgacttcgatcttatcaagtctaactttgctcaatttgaagccatccaagctgatcataaagtcacatctgcatcagctgtcaaatatggtggtgtcgttgaagcgcttgctcttgcaacatttgggaaccatatcggagcaaacgtcgaattagctgaccttgacactagcttgacagcccaattgggtggattcgtcttcacatcgcctgaagaaattgcaggtgttgccaagatcggacaaacagtgactgactttacactcactgtcaacggtgtaacgcttgatggacacaaacttgacagtgccttccaaggtaaattggaagaggtttacccaacggaatttgcacaggcaactgagctggaagaagtacctgcagtggcatcagatgctgtgattaaagctaaagaaacagttgatacaccagtggtttacatcccagtattcccaggtactaactctgagtacgattcagctaaggcctttgaaaaagaaggtgcaaaagttaacttggtaccatttgtcacactgaatgaagaggcaattgtcaagtctgttgacactatggttgacaacatcgaaaaagccaacattatcttctttgcaggtggcttctcagcagcggatgaaccagatggatcagctaaatttatcgtgaacatcttgctcaatgaaaaagtacgtgcagccatcgatcacttcattgaacgcggtggtttgatcatcggtatctgtaacggattccaagcccttgttaaatcaggtcttcttccatacggtaactttgaagatgcaagtagcaccagtccaaccctcttctacaatgatgccaaccaacacgtggctaagatggttgaaacacggattgccaacaccaactcaccatggcttgctggagtgcaagttggggacatccatgccattccagtatcacacggtgaaggtaaatttgtcgtgacagctgaggaattcgcagagcttcgtgacaatggtcaaatctttacccaatatgttgacttcgaaggtaaaccaagcatggattctaaatataatcctaacggatctgtaaatgctatcgaaggtatcacaagtaagaacggtcaaattattggtaagatgggtcactcagaacgtttcgaagatggtctcttccaaaatattccaggaaataaagaccaacatctctttgcatcagcggttaaatactttactggaaaataaaaggtatacaacatgacatacgaagttaaatctcttaatgaagaatgtggtatttttgggatctggggacacccagatgctgcaaaactgacttatttcggattacacagtcttcaacaccgtggtcaagaaggggcggggatcctttcgaatgatgcgggtcaactaaaacggtatcgtgatacgggtcttctctcagaagtatttcgaaatcctgctaacttggataagttaacaggaacgggagcgattggccatgttcgctatgcgacagctggggaagcttcggtggataacatccagcccttcctctttcgctttcatgatacccagtttggactggcccacaacgggaatttaaccaatgccaagtcccttaaacgggagttggaaaataacggagcgatctttagctcaacttctgattcagaaatcttggcccacttgattcgtcggagccacaacccttctttcatgggtaaggtgaaagaagccttgaatacggtgaaaggtggatttgcttaccttctcatgctggaagataagctgattgcggccttggatccaaatggtttccgtcctctttcgattgggaaaatggccaatggcgctatcgtagtttcctctgaaacctgtgcctttgaagtggttggtgctgagtggatccgcgatgtgaatccaggtgaagtcgtgatcatcgatgataacggcatcacttacgataactatacaacggacacccaattggctgtttgctcgatggagtatatctactttgcccgtccggactccaatatccaaggggtcaatgtccatacagcacgtaaacgtatgggcgctcaattggcacgtgaattcaaacatgaagcagatattgtggtcggtgtacctaattcatcacttagcgcagccatgggatttgcggaagaatctggcctaccaaatgaaatgggcttgattaaaaaccaatatacccaacggacctttattcaaccaacacaagaactacgggagcaaggggttcggatgaagctctctgccgtatccggtgtcgtgaaaggcaaacgggttgtcatgattgatgattctatcgtacgtgggacaacatcacgtcgaattgtgaagctattgaaagaagcaggagctacagaggtccacgtagcaatcggtagcccagcccttgcctacccatgtttctacgggatcgatattcaaacacgtaaggaattgattgctgccaatcacacagtagaggaaacacgcgatatcattggtgcagatagcttgacgtatttgtcaatcgatggcttgattgattctattggaattgatacagatgctccaaatggcggtctttgtgtggcttactttgatggaaaatatccaacgcctttatatgactacgaagaacgctatgtggaaagtttgaaagaacatacttctttctattaagagcagtgcaaaagaaaaggaatgaaacaaatgacaaataaaaatgcgtatgcgcagtctggtgtggatgttgaagcaggttatgaagttgttgaacggatcaaaaaacacgtggctcgtacggaacgtgcaggtgttatgggagctttaggtggcttcggtggtatgtttgacctttcaaaaacaggtgtcaaagagcccgttttgatctcaggtacagatggtgtcggtactaaactcatgcttgctattaagtacgacaaacacgatacgatcggtcaagattgtgtcgctatgtgtgttaacgatatcatcgctgcaggtgctgagcccctttacttccttgactatatcgcaactggtaaaaatgaaccagctaaattggaacaagtcgttgcaggtgtggctgaaggttgtgtgcaggctggtgcagctctcattggtggtgaaactgctgaaatgcctggtatgtatggtgaagacgactatgatttggcaggatttgctgtcggtgtcgcagaaaaatctcaaatcattgacggttcaaaagtagctgaaggcgatgtgattcttggccttgcttcaagcggaatccactcaaatggttactcacttgttcgtcgtgtctttgcagattacacaggtgaagaagttctccctgaattggaagggaagaaacttaaagacgttcttttggaaccaactcgtatctacgtcaaagcagctttgccactcatcaaagaagaattggtcaacggaattgcccacatcacaggtggtggtttcatcgaaaatgtaccacgtatgttctcagatgacttagctgctgaaattgacgaaagcaaagtcccagttcttccaattttcaaagcccttgaaaaatatggccaaatcaaacatgaagaaatgtttgaaatcttcaacatgggaattggtctcatgcttgcagtgaaaccagaaaatgtggaacgtgtcaaagaacttcttgacgaatctgtttatgaaattggtcggattgtgaagaaagatggcgcaagtgtggtgattaaataatggtgatatcaccattttatacggagaaattgtagaaaggagtgtttagttagctagcctaactgaacacgggactcattttctaggaaaaaagagaaatcattttgtgtgcaagcacccagcaatgatttcctatttttctacgaaactgttcggctagccgaaacgtccctttgtatcgaatatgaaaattgctgtttttgcctctggcaacggctcaaactttcaggtgattgcggaacaatttccagtagaatttgtcttttccgatcaccgggatgcctatgtcttagaacgtgccaaaaaccttggcgtggtgagccatgcctttgaactcaaggaatttgataataaagcagcttatgaagaagctatcgtcaaactcttagatgaacaccagattgatttggtttgcttggcaggttatatgaaaattgttggtccaaccttgctagcaacttatgaaggccgtatcatcaatattcacccggcttatctccctgaatttccaggtgctcatggtattgaggatgcttggaatgcgggtgttgctgagagcggcgtgaccattcactgggtggattctggtgtggacactggtaaggtcatcaaacaagtccgtgtgccacgtctagaaagtgatacccttgatactttcgaaactcgcatccacgaaacagagtacaagctctatccagtagttttggaacgtttgggagtagcacgaaaataaggaagccattgatcggaaagaacattttcgactgtagcagataaagaacttttttaaaaaggaaaagaaagaaaatgactaaacgcgcactagttagtgtttcagacaaagcgggcatcgttgaatttgcccaagaactcaaaaaacttggttgggacatcatctcaacaggtgggactaaagttgcccttgacaatgctggtgttgataccattgccatcgacgatgtgactggtttcccagaaatgatggacggtcgtgtgaagaccctccacccaaatatccacggtggtctcctcgctcgtcgtgacctcgatagccaccttcaagcagctaaggacaataatatcgaattgattgaccttgttgtggtcaacctttacccattcaaagaaacgattcttaaaccagacgtaacttacgcggatgcggttgaaaacatcgatattggtgggccatccatgcttcgatcagcagctaaaaaccatgctagcgtaacggttgtggtagatcctactgattatgctgtggtgcttgacgaattggcagccaacggcgaaacaagttacgaaactcgccaacgtttggcagcgaaagtcttccgccacacagcagcctatgatgctttgatcgcagaatacttcacagctcaagtgggtgaaagtaaacctgaaaaacttactttgacttatgatctcaagcaaccaatgcgttacggggaaaatcctcaacaagacgcagacttctaccaaaaagcttttccaacggattactccatcgcttcagcgaaacagttgaacgggaaagaattgtccttcaacaatatccgtgacgctgatgcggctatccggatcatccgtgatttcaaagaccgtccaacagttgtggccttgaaacacatgaacccatgtgggattggtcaagctgacgatatcgaaacggcttgggactacgcttatgagtctgacccagtatccatctttggtggtattgtcgttctcaaccgtgaagtagacgctgcgacagctaagaaaatgcacggtgtcttccttgaaatcatcattgcaccaagctacacagacgaagcgcttgaaatcttgacaactaagaagaaaaacttgcggatccttgagctgccatttgacgctcaagatgctagtgaagtggaagcagaatacactggtgttgttggtggtctcctcgttcaaaaccaagacgtggtgaaagaaagtccagctgactggcaagtggttaccaaacgccaaccaactgagacagaagcgacagctcttgagtttgcttggaaagctatcaagtatgtgaaatcaaatggtattatcgtgaccaacgaccacatgacacttggtgttggcccaggtcaaaccaaccgtgtggcttccgtccgtatcgccattgaccaagccaaagatcgtcttgacggcgctgttcttgcttccgatgccttcttcccatttgcggataacgtggaagaaatcgccaaagcagggattaaagcgatcatccagccgggtggatcagtccgtgaccaagagtcagtcgaagcggctgataaatacggattggctatggtcttcacaggagtaagacattttagacattgatgggtatttaaaaattagctcattatcaactgtgataaatgatttatcgctaacaacgagagaagacgtaagttgtcttctctttttgtacgtctaaaacaataagcattttagtgttagaaattattaaaatgatttgttagaactgttcatgacgaatctcgaaaaactcagtttctcacttaactattttttatacgttttatggtgtttaaggttgttgtgactagctcgttaacaggcatggctttataatctccttttaaccattcatcaaaaatattgtagagaccgccggtaatgaatctactatcatagttgatttgtctttgatcactatttgtaatgtgccaaggtgccatgacagtggtataagcagcaagaaacttatcataagaccttggcaagataagcacgagtaagtttgcgtcttgcaaaatttttaatggctcagtgtactggctccaatactgaaagaaaaggttcactaaatcttcaaaattagttagttttgctgtttgaagttcgataatatagtattggattaagcggtctaaatagttcgtaagaacttcctcttttgaatggtaataacgataaaatgttcgtctagcaatctgagcatgctcgctgagttcagcaatgctgatattttggagagacttcttagttgctaataaatcgaacaaggcttcctccagccattgtcgcgtttgatattccatggtatttttcctttcctgtcacacttttggtcaaactgtgccaatttatcttaacctcttgtttttgtaacagtttatctttatactaaaagtgttgcgcgtgatatatgatgatcatttattcttaacattgtataattgttagttgttattaaggaggtaaaggtatgagcattctttttaatgtttggatgctgcctattttatttattttacatgattttgaagaaataatttttatgcccttgtggaaaacacggcatcatcaaaagttagaaacttttaagaaaccgttctttggttccgttacgcaaggttccgcttttgcagtaggtgtgttcgaagaatttatcatcctggtgtttatttctggattctgccaaataactcacaacagtttactctatttttcttttgtaatagcttatacagctcatttcataatccattatatcatgtgcctacaatttaggggctatgttcctggagtcgtcacggtaaccctagaattgccaatggttctaatgattgtttcccactattggccttctgacagttctttgttatcagtcgttgtctatcttttattggccatggtattagcttttacgaatcttaaaatcatgcatctcatcatgccaaaaattcaaatacatctagaaaaatacgcgaaatgaaaaacgattaaatgagagctactttttaacctttctgatataactggttaatgagcagccaagaatctatcgaagctgctgataaatacggaatggctatggtcttcacaggagtaagacattttagacattgatcaaataaggcacacatcaatggatgggtgccttttctgctggttaagacgaccttaatctgggtagatataggtgacagttccccagatggggttggtcggatcaaaccagccacggaagttgtcgatatagcgatggccgttgtaattagcctcttggatctgaattttttggtcatgttcgacatccgtaaccaaggcgacatgcccatatcccccatcattccaacaggcgatggcaccgacctctgggatgtctcctgtccggaatcccgcagtgcgtgcactagctgcccacatgccaccgtttccccaccagttgtgggcccaaggggctaattctttggctccccaggtgcactcaccgatggggtaggtgtttcccggatgtgtcgcgagtggagtgagctttggctttgccttttccacttgaaaggtagtggggaatagtccttgtagttgccccttctttttctgatagacatgtaggtgaaatagcccgcttcccttgtgtttttgagcctgaaagcgcagttggaagtgtccaggtgcaatcttctttgcgggataccagaccagatcatcctgcccgttttcttctgaccagatggggaagacaatctcgtcaacgtcttcgaacaactttaggtctacctcaaattcttgtgaggagatgggtgtgatcgtgatcttgggttgggaagaagccaggtctttttgctggacgctggtcgtgagagggtaaagaccggttaactgttcatttgcctccaccccatagacatgaacatgataaagtccggcttgatcagaatggttggtcaatggcacttgtaggtcaaatcccttgtcactgcgttccacaggataccaagtcaggtcatcttggccattttggtcagaccagatgggaacttggatcttatgatacttatccgggacatttccaagatgaatcatcagctgccctttttcggcatagatagcattggtcgcttgatctgcatgagcaaaagaggtttgcatcccccatgtcgcacaagtcagtacgataatttttttgatcgtttgcataatactccttttcgtcaattagtaggtctcacctatactattcggaaaaaaatgagaaataggagaaaatagcaaaaaatgtttggattctactgaaaataggagacttttgctgaaatcattagaataaagcgaacgattatgatataatttaataaaataattcgcaaaagaggttcaagatgaaacttttggttgttggttctggtggtcgtgaacatgcgattgccaagaaattattggagtctaaggacgttgagcaggtttttgtggctcctggtaatgacgggatgcgattagatggtctggatttgatcaatatcggaatttccgaacattctaagctgattgacttcgcaaaagcgaacgatattgcttggacctttatcggtccagatgatgcccttgcagctggtatcgtggatgatttcaatgcagctggtctcaaggcctttggtccgaccaaggctgcggctgagctggagtggtctaaggattttgctaaggaaatcatggtcaaatacgacgttccgacagcagcctatggaaccttttcagatttcgaggaagccaaggcctacatcgaggaaaaaggcgctccaatcgtcgtcaaggcagacggtttggcccttgggaaaggtgtcgtcgttgctgaaacggttgagcaagcagttgaagcggctcaggagatgcttttggacaataaattcggtgattcaggtgcgcgtgtggtcatcgaggaatttcttgacggggaagagttttctctctttgcctttgtcaatggagataaattctacattatgccaacggctcaggaccacaaacgtgcttatgatggggacaagggccctaacactggtgggatgggtgcctatgcgccagttcctcacttgccacagagcgtggttgacacagcggttgacaccattgtcaagccagttcttgaaggcatgatcaaagaagggcgtccgtacctaggtgtcctttacgcggggcttatcttgacagctgatggaccgaaagtcatcgagttcaacgctcgttttggagatcctgaaacgcaaatcatcttgcctcgtttgacatctgactttgcacaaaatatcactgatattttggatggcaaagagccagccatcacgtggacgaacaagggtgtgacactaggcgtggttgtggcctcaaacggctacccactcgcttatgagaagggtgtcaaacttccagccaagacagatggtgacatcatcacttactatgctggtgccaaattcgctgaaaacgggcaagacctcctctcaaacggtggacgtgtctacatgctggttaccacagcagacaccgtcaaagacggtcaaaacatcatctacaacgaactcaacaaacaaaacacagaaggcttgttctatcgtacggatatcggtagcaaggcgataaaagattaacagatactaactttgtcatggcgagcgaaagcgagtcaagctaagataatggtcgcttaatttgcgagcgttagcgagctagtataggataatcgtcgcagtagtggaactcctagtagcagagctactaggagcggaaaactggagactcaggctccagttttagtaatggaacgccacaggcggtcgcttacgtccgcactacaatagacgattatcaaaaaaggagaataaatgaaaccagtaatttccattatcatgggctcaaaatctgactgggcaaccatgcaaaaagcagctgaagtcctcgataacttcggtgtcgcttacgaaaagaaagttgtttccgcccatcggacgcctgacctcatgttcaaacatgccgaagaagcacgtagccgtggcatcaaggccatcatcgcgggtgcaggtggcgcagctcacttgccagggatggtcgcagccaagactacccttccggttattggggtacccgtcaagtctcgtgcccttagtggtgtggattcgctctactctatcgttcagatgccaggtggggtacctgttgcaaccatggcgattggtgaagctggtgcgactaacgccgccctctttgccctccgtcttctttcggtagaggaccaggctattgcgacagcgttagcggatttcgcagaagaacaaggaaaaatcgcagaggagtctacaaatgagctcaactaaaaccattgggattatcggtggtggccagctcggtcagatgatggcaatctcagctatctacatggggcacaaggttatcgcactggatccagcagctgattgcccagcctctcgtgtggcggaaatcatcgtagctccttacgacgacgtggatgcccttcgtcagttggcagatcgctgtgatgttctcacttatgaatttgaaaatgtggatgctgatggtttggatgccgttatcaaagatggacaactcccacaagggacagacctgcttcgcatctcccaaaatcgcatttttgagaaggactttctttccaagaaggcacaagtcactgtggctccttacaaggtcgtgacctcaagcaaagacttgtcagatatcgacctctcgaaaaactatgttctcaagacggcgaccggtggttacgatggccatggtcagaaggtcattcgttcagaagaagatttggaagaagcctatgcgctagctgactcggcagactgtgtcttggaagaatttgtcaactttgatcttgaaatttcggtcatcgtgtctggaaatggcaaggacgtgacggttttccccgttcaggaaaatatccaccgcaacaacattctttcaaaaaccattgtgcctgctcgcatttcagaaagtctagctgaaaaagccaaggccatggcagtgcgaatcgcagaacaactgaacttgtctggaactctttgtgtagaaatgtttgcgacagctgatgatatcatcgtcaacgaaatcgcgccacgtccacacaattcagggcactactcaattgaagcatgcgacttctctcagtttgatacccacatcttgggtgttctcggagcaccactcccagcaatccaccttcatgcgcctgctgtcatgcttaatgtactcggccaacacgtcgaagctgctgaaacatatgtgacagaaaatccaagcgctcacctccacttatatggtaaactagaagcaaagcacaaccgcaaaatgggacatgtgactttgtttagtgatgagcctgatgaagttgaggaatttgggaaagggattgatttttaaaatggtagaagaattcgatgatgtattcgaagatgatattactactctaacatttacttatgcggacgatgtagagattccagaaattcctgatgcagaagggatccatgttgtagagataacaaataatcaattagttataaagcatatccgcgatgatgatgaggtctatgattatataaagagttttggattaacaagtcgccctataaaactttcgattgaattttgtgtttacgaagattctgaggaagaatagtatttaaattgaatggggagaatttaggattcaactcatcgtcaactcatttgttaaacaagagaagccagacaactactgaaggaaagggattgatttttaagtgaaaatagcgattctaggacttggtgtcattgggactacttatgcctatgcctttcaacaggcaggccaccaagtagaacatgtattgagagacagtaagaaaaacactgctccgaaggagttgtcggttgatctgctagatggccgctatcattctaagggcgaaaacaaacatgatacctatgaggttcatgtggcagaagctgattcggaatatgattttatttttctgagtgttcgtcatggctttgtcaaagaagccgtggaaaccttgcgaaaaaataatatcaaaggcaccctcgttttcttctgtaatttctgggatactcgaaaagaggtagaggagtgggcaggggattacgactatattctggcctttccgacagcgggcggtcacatgcaagaggaccgtttggatggtgtcctatttgatcatttaatgctagaaggtgagcaaaaagcacacatttctaactatggtgatctgacgactttactgacttctgcagatttgaagtgggaagtgcctcatgatatggtcgagtggatttggattcacatggcgattaatgcaggtgtcacttcgacagctgcgcgttcgggaaatttggaaaatccagaacagctggctctgaacttgatgaatagttcttcggaattatcattggccatcaaggccattcgagaggctttgaaagtcgtagaagcgcgtggcgtgaatttgaagctttacaaagctgaactcttaccttacaaaattcccgcttggatagccggcaaagccatgaaagtcatgtttgcgaaaaatgagctaactcgaaaaatcatgaccttgcacaatgacaaacaggacatcttctattgttgtcaaagtgtttatcagactggtcaggagttaggtgtcaagatgcctattctggaagcaaatatgaagggtatttcgatttaggaggttttatgattcaactcattgtcaatgcttttgttgagaaggacaagacaggagcagtcgtcgaagtcttgtatgctagtagtgatcatgaaaaagtgaaagctaagtatgaagagctgactgctcaatatcctgaaaactatttagctatctatgatgttccgctggatacggatttgaatacactggatcattatccatctgtgtggattgggaaagaagaatttgaataaagcgactgtcggttgctaactgatgtaaaacatcaaaagaaaggaaaattaaacatgattgatagatatagccgcccagaaatggcgaacatttggactgaagaaaataaataccgtgcttggcttgaggtggaaatcttggctgacgaggcatgggctgaattgggagaaattcctaaggaagatgtggctttgattcgtgaaaaggcggactttgacatcgaccgtattttggaaatcgagcagcaaacacgtcacgatgtggtggccttcacgcgtgcggtttctgagacgcttggtgaagagcgcaagtgggttcactatggtttgacttctactgacgtggtcgatacggcctatggttacctctacaaacaagccaacgatatcatccgcaaggaccttgaaaacttcctcaacatcatcgctgacaaagcgaaagaacacaagtttaccatcatgatggggcgtacccacggtgtgcatgctgagccgacaacttttggtcttaaattggcgacttggtacagcgaaatgaaacgtaacatcgagcgtttcgagcatgcggctgctggtgtggaagctggtaagatttctggtgcggttggtaactttgccaacatcccaccattcgttgaaaaatacgtctgcgataaattgggtatccgtgctcaagaaatctctacacaggtccttcctcgtgatcttcacgctgagtactttgcagttcttgctagcatcgcaacatctatcgaacgtatggcaactgaaattcgtggtcttcaaaaatcagaacaacgtgaagtggaagagttctttgctaaaggtcaaaaaggttcttcagcaatgcctcacaaacgcaaccctatcggttctgaaaacatgacaggtcttgcgcgtgtgatccgtggtcacatggtcacagcttatgagaatgtctccctttggcacgaacgggatatctctcactcatcagctgagcgcatcatcgcaccagacacaaccatcttgattgactacatgctaaaccgtttcggaaacatcgttaagaacttgacagtcttcccagaaaacatgattcgcaacatgaactctacatttggtttgatcttcagccaacgtgccatgttgactttgattgaaaaagggatgacacgtgagcaagcttacgaccttgttcaaccgaagactgcccaatcatgggataaccaagtagacttcaaaccacttcttgaagcagatccagaagtaacttcacgtctcactcaagaagaaatcgacgaaatcttcaacccaacttactacaccaaacgggtggatgaaatcttcgaacgcatcggtttgggtgactaatcgcaacgaaaaagggaatttgaaaaatagacgaaaagaagcagaggaatctgcttcttttttaaactttttatagctaaactatcactaattatatatatttttaaagaggtctttagaaatcgctttcaacatgctatactggatctataaaaaagaccgagatgtctcagtctttttggttcttagtgatcgcggtcacaggagatgaacttgatcttgtagtagtcaccgcgtttataggtttccgtgtattcaaggatttggccagtcgcttctagcttggtcgtcttcacttgtttgaccgttgggaaattttcgtcgatctttaatactttggcaaccttgcttggtgtaggaaagacgatttcgttgacttcttcgaagtgctcatcattcatatgaatgtgatagtcttctttgaagcgatcatagatagagctgtagtattccaaatttggatagtttggattgatgtattgttcaggaatataggtttggtggaagatataggtatcatcccctgtctggcgagtccgttcgatcttatagtagaattgcgttgggttgaggcctagtttgtctaggatgcttaaggtatttccacgtttaatagagagaactttgactttggccttttggattgggaaggtctcaacatctgaaaattcaaccagtttgtgttttcgagcacgagaaacaaaggttccttttccttgctgacggacaatgtagccatcagcagcgaggtcgttcaaagcacggacaacggtgatagagctgacatcataaattttaatgagttcagcttcagtataaaatttatctccattttcaaattttccggagataatttgctgcttcaattcatctttgatgtgttggtactttggaattgccatagtgctacctctctttagatttctcttatttaaccctattttaacatattttttataaaagtgttgacattttttaaataatttattatattaataaatgaaaagggttacatataagaaaggggggcgtttatgggagtttttgagattcgcgatgctttctatttaaaaggtcaacccttcaagattttgtccggagcgatccattatttccgaattgacccagcagactggtatcattccttgtataatctaaaggctttgggttttaacacggttgaaacctatgtcccttggaatgcgcatgaaccccgcaaagggcagtttgactttagtggtcgattggatctagagcgtttcattcaaacagcccaatcccttggactttacatgattgtaaggccgtcgccctttatctgtgcagagtgggaatttggtggattaccagcctggctcttagaagaagacctgcgaatccgctcatcagacccagcctttatcgaagcagtggatcgttattatgatcgcttgcttggcttgttgacaccctaccaagtggatcagggtggtccaatcctcatgatgcaggtggaaaatgagtacggctcttatggagaggataaggattatcttcgtgccattcgggatttgatgaaggaaaaaggcgtgacctgtcctctctttacatcagatggaccatggcgagcaacgctaagaacaggaaccttgatcgaagaagacctctttgtgacgggaaacttcggttccaaagcagcctataacttcggtcagatgaaagaattctttgacgaatacggcaagaaatggcccttgatgtgtatggaattctgggatggctggtttacccgctggaaggaacccgtgattcaaagggacccagaggagttggcagaagctgtccatgaggtcttggagcttggttccatcaacctctatatgtttcatggcggaaccaatttcggcttcatgaatggttgctcagctcggggaacgctcgacttgccacaggtgacgtcctatgactatggggctttgctcaatgagcagggaaatccgacggagaagtattatgctattcaaaaaatgatggcgacctattatccggaatacccacagcaggaaccgctcatcaaagagtgtttgccagaacaaaccttgcaactggcagccaagactagtctttttggaaatctggacaatctggctcaggttgagaccagcctttatcctgaaaagatggaagagttggggcaaaccacaggttatctcctatatgagacagaccttgagttggatgcggaagaagaaagactgcgcatcattgatggtcgggatcgggtacagatttacctggatgatcaacatgtagcaacgcaataccaaacagagatcggtgaagatctttttatcaaaggaaaaaagaaagcggttacgaatttaaaaatcttgcttgagaatatgggacgtgtcaactacgggcacaagctcttagctgatagccagcacaagggcattcgcacaggtgtctgtgtagatttgcacttccatcttcattggaagcagtacccactggatttacaagatctcagtcagctcgatttttcaaaggaatggcaggcaggtgctccagcattttaccgatatgattttcagctggaccacacccttgatacttatctggatatgacaggatttgggaaaggggtcgtctttgtcaatggccataaccttggccgcttctgggaggtcggaccgaccacttcactttacgtgcctcatggttttctcaaagaaggagccaatagcctgatcgtctttgagacagaagggcgttaccaagagacacttcaacttgttcaacaacctacattcaaagaagtaaagggggaaaacttatgactattgtaggatgccgtatcgatggacgtttgatccacgggcaggtagccaatctttggactaccaaactaaatgtttcacgtatcatggtgatcgatgatgaagtcgctcaaaatgatatcgaaaaaagtggcttgaaactagcgacaccacctggtgttaagctcagtatcttgccagtcgcaaaggctgcggaaaatatcttggctggaaaatatgatagccaacgactttttatcgtagctcgcaaacctgatcgtttccttcgtttgatcgaagcaggtgttcagcttgaaacgctgaatgtcggcaatatgtctcaatctgatgagacacgtgcgattacccgctcgatcaatgtggtggacgcggacgtggaagatttcaacaagatccacgaaaaaggtgtgaagattacgtctcagatggtgccaaacgacactgcagaagactttatgaagttattaaagtaaaagaaaatttttaggaggaaattgtcatgatacaatggtggcaaattttactacttactttgtactcagcttatcaaatctgtgatgagttgacgattgtttcatcagcaggatcaccagtctttgctggtttcattacaggacttgtcatgggagatttaaagacaggtctatttatcggagcttctcttcaattgacagtgctcggtgttggtactttcggtggtgcttctcgtattgacgccacttctggtgccgttcttgcgactgccttctcagtagcaaaagggattgatccagagattgctattgctacaatcgctgtgccagtagcaactttgttgacctactttgatattcttggtcgtatgactacaacttacttcgctcaccgtgtagatgctgcaatcgaacgttacgactataaaggaattgaacgcaactaccttcttggtgctgttccttgggctctttctcgtgcccttccagtcttcttcgctcttgcctttggtggtactttcgtagaaactgttgttacaggtcttgctaatgtacaatggttggcaaacggtctgaaacttgcaggtcaaatgcttccaggtcttggatttgcgatcttgcttcgttaccttcctgttcgtcgtaaccttcactacttagcacttggctttggcttaacagcaatgttgacagtgctttatagcaatgttcaaagccttggtgctgcagtgtctagcattgttggttctgatgtgttcgctaaacttccaaaagaacaagctattacttttgttaacaacttcaagagtgtatctatgattggtattgccattatcggtatcttccttgcagtacaacacttcaaaaacagtcaacgtacagtcgtagctgctccagcaagcaatgtagaaagcggggaaattgaagatgacgaattctaattacaaactaacaaaagaagattttaaacaaatcaacaaacgtagcctcttcaccttccaattgggttggaactacgaacggatgcaggcttctggttacctttatatgcttttacctcagttgcgtaaaatgtatggtgatggcactccagaattgaaagaaatgatgaaattgcatacgcaattcttcaatacttcaccattcttccacaccattatcactggttttgaccttgctctggaagaaaaagatggtgtcaaatcaaaagatgcggtgaacgggatcaagacaggtctcatgggaccattcgctcctcttggggactcaatctttggatcattggtaccagctattatgggttcaatcgcagcaactttggctattgcaggaaacccagccggtatcttcttgtggatcgctgtggcagttgcttatgacattttccgttggaaacagttggaatttgcctataaagaaggggttaacctcatcaacaatatgcaaagtaccttgacagctttgatcgacgcagctgccgttctgggtatcttcatggttggtgccttgattgccagcatgattggtgttgaagtttcttggactccacacattggggacaaagcgattgaaattcaagatatgctcaaccttatcttcccacgtttggtaccagctatcatcacaggtgtaatctactggttgcttggacgtaagggtatgaactctacaaaagctatcttgctcatcatccttgcagcaatcgcattctcagcatttggccacttcttctttggaatggcataatggagtaaggtatggcaaaagagttagtattggtcagccatggtcgcttttgtgaagagctcaaagcgagcacagagatgattatgggaccacaagaatccatccatacggttgcactcttaccagaagaaggaccagaagactttactgctaaattcgaagcaacagtccaaggtctagaagactatattgtatttgccgatctcttgggaggaactccttgcaacaccgtgagccgcttgatccttgaaggacgtgcgattgacttatacgcagggatgaatcttccgatggttatcgaattcatcaatagtagcctgactggtaatgaaggggactaccctgaacgtgcaaaagaaagtattgtcaaggtcaatgacctcttgtcaaaccttgatgatgatgaagatgagtaggttggtatgggagtctgggagcatcatctcaggctcctttcccatttatcaacgttagattgtagaaaggaacaacaggttctatgttagactatacaaaagaagacttgcaggagctaggagcagagatcacaacacgtgagatttaccaacaaccaagtgtttggaaagaaacggctcgcttgtaccaagaaagaaaagcggaaataaaaactttcttagaaaaaattgggcaagagcatgactatatcaaggtcatcttgacaggggcaggaacctcagcctatgtgggggataccttggttccttacttgcaggaagtgcacgatgaacgccactggaattttcaatccattgcgacgacggatatcgtagctcatcctcaaacctatttgaaaaaagaggttccgacggttttagtatcctttgcccggagtggcaattcgccagaaagtgttgcaactgtgcagttggcccaagatctggttgatgaactctatcagatcactattacctgtgccgaagaaggaaaactggcccagcaagcccacggggatgagcgcaatctattgcttctccaacctaaagaaaccaatgatgccggctttgcgatgacctctagctttacctctatgcttttgacagctctcttggtctttgatccaagtgaggaagagatcaaggaaaaacgagtagaagaactgattcatctgtcggagcaaatcttggagaaggatcgtgaggtcaaagaagtggtcgatctagactttgagcgcgtgatctatctgggggcaggacctttctttggtctagctcatgaagcccagctcaagattttggaattaacagcaggcaaaatcgcaaccatgtatgagagtcctgtcggtttccgtcatggtccaaaatccctcatcaatgaccagactctcgtcttggtctttggatccattgatccttatacccgtcagtatgatctggacttggttcgcgaagttgcaggggatcagattgcccgtcagatcgtcctcttgacggatcaagctgcagggatcgagcatgtacgagaagtgttagtagaagcttctgcagcctcactagatatctaccgtgccttcccttacattatctatggtcaattgatttctctcttgacttcgctcaaggtgcaaaatcgcccagatacgccttcaccgactggtaccgtcaatcgggttgttcaaggggtgatcattcatccatttcataaagaatagccactaattttctataaaaagtggagtgtttcttcttgtgaaactgatacaatggagaaaaatagtgagaggagaaggtttgtgaaacagtatcaagaaagcgtgtttggggaatggcagaatcaagaggttcgggcttatcgcctcgaaaatgacaagggctaccaattatctgtcatgacctatggggcgacaattttagaatatgtgacgcctgataaagaagaccagtttacgaatattattctaggctttgatcgcttcgaggactatgtgggcaatagccctaaatatggggctagtattggcccggtagcaggccggattgcaggagctagctttgaactcaatggtcaaacctatcacttggaagccaataacggtgccaactgcaaccacagtggaccgacgggttgggacagtgccttgtttagcgtggagtcggtaacggatcaggaaattactctgtacacagaacgtgcagatggtaccggcggtttccctggaaatctcaagatctgggtaacctatggtttgacggaagatggtgaactcgagattgcttatcgggtagaaacggatcaagataccttggtcaacccgaccaaccacagctatttcaacctatctgggaacttcacccagccgatcaatgaccatgtctttcagatcaaccatcaagggctttaccctatccatccagacggtgttcctcttcagaccgtggatagagaaagtccggttgtccagcatctctaccaagctatgctcttggaggatctttttaaggactctgatccgcaaatccgtctggtagaaggattagaccatccatttgctcttccagaagggcatgaaaatgccggctttctttaccatcagccatctggacgttttttgaccttcaggtcagaagccccagccttggtggtatattcagccaatttcgtagacgaaactgttcatctgcaaggccaaccaatggttcagcacaatggcctggccctcgaatttcaaacagtgccagatgccattcatagtgaccaagctgaaaaggttatcttgagagcagggcaagtctttactagcaagaccagctaccatgccatcgctaagaaataatgagaaaaggggggctccaaacaaggatgtaaaattcttgctcaaggccccctcttttttagaaaatattttttaaaactaactataaggaaactttaagcttcccgtcgtatactaataccatcatcaaagacctcctaactttgaatgataaaactcctaaaactttttcataataatctccctataagagccaccaaaaccggtggctttttttctacgggagtgagatagaacaattttttaaaattgcttcgcttccttattttttggcttaggttgaaaaggttccccaaaccttttcaattgtctcacccccgcacagttgattaggtattctttggagctataagagcgaacaaagataccaatcaaccactgcgttatgtatttattactaaacttaattcattggaccaaacctgacaagggaagtatataagcttaggtacgttccttattacctttacgagtatcagcgagtttgggtacgttccttcctaaccgaaccaaaccaagggtactgaagtattttaatagagtggaggttctgaaattaatttttttgtcatttttttatacatgtgaaggctcctttctattctgttactttcttgaatgtcattttcattgttgttaaaacgccacgctcattattccctctagcactgattacgagggtgtccccatccaattcatattgataagtgattggacgatttggttgcatggtcagtcctaaagaaaatgtcataagaagaattggtgtttctttaaaattaatcgttttgttacttgtatcgacagtcccatcaggaagagagaaatcaaattggtttgtttctttgtccatcttgatttgagccactttaaaaattggaattgctttttcatagtcctcgtataaaacagttttgaattctgatttatctgggaaagaatttttataagtatgttcatacagattttcgaaataacgtgtgaaattatagctatattttctgaaataacgagttgtggtttctagtcctctaaatcatcaatcgcataagcgtactttattgggtcggaacctcttaggacaaatgattttcttaaagtagtcttcacatcggtcatttcccaagtaccatcaagcgtaatagatttttcagcagttgtttcttgtgaagtcgttgagttgtttgtcgttgaagtagagcatcctgcaaataggagagcacataagatcgtcaacgtacccagccaatattttttagtccagtatttcataaaaggacctcctaaaagttaatcgttttatgcttatatcatatctctttgtgataaaaaacgcaaattgcttttcgtaatactataaagtgaaaataggacaacaaaaaaagaatgtagtaaaactacattcctttttgtttatcagagttgtctgggtaagtggccctagcgaatagattattccgctacttttttgaaacgcatcgtgaagtagccaacaatcttttcttcaccactaagtgttttaggctgttcaagagtcagtgttaaaattccatcttcaatggaatatttatagcttactggttttatgaatttctcattggaaaatgttactaaatcaatgaacattggcgcgttcttgaattcaaacgtacccgtgctctcgttaattgtaatttcttttaaagtttgatggatttcatacttttcatcgttgaattcaaagctgagggggcctttcatattgttataaagttctagttgctttttcaaatcttcatactgatttttaatatattgttctttggtcccttcgacactcgctaacttttgggcttttccgtaatcatagaagttgccgacagccactttagtcgtagccgttagttcgtatacagcagaatctcctgtaatcgtcagtgtcggtgtcacgtccttgaaggcatcagaataaatgagtcggcgtggaatttcttctgaatctaagaaatctttataacctaagccgcgttcgagactacttctgaagtcgatttgttcccattttccttccagtggattggaaggagcagttgttgtagtagttgttgtagcggtttggtttccgcagccggcaagcattaaaagagagcagccagcaatgaataatggttttaagtattgtttaaacatggtcgcgtctcctttctatttcttttctgcacttggtacgcgtttgaaagtcagttcaaaatgaacaggaagattatccttcgtcttcatatcagcgtagataatcaagaagccatcttttacttcataattgtatgttactggatcgaatctatgatctttacccgctgtcgttagagggaaggagtcaagaatcatgagcccttcgtcaaatttgacagtcttcgctttttcatcaatagttcctgtagcctcgtagctataagttccagtcgatgtatccattgatgctttatatttcttgaagttttgcacgaactctggttgtccgttaatataacggttaacaaattcatcttctgtcatttttttcttatcctttgaaatctcgtagaatgcttttgcgaacttcttcgagtcaaattgatagcttagctttgcgcttgtgccatcaacggataatttcatcttgaagtctttaaaggcttcaatgaatttcgcataagtataacttttcattcctttcgggaaaaaggctttttgcaatgaatcgagctcgtatacggattcccattcaccagcaatggtttctacttttggggcttctgtttgagcggcactttgagagttgctttgtttttgagaacaagaagccagtacgaagactgagaatagagcaacgaatgctaaaaataattttttataatgtttaagcatcatcagacctccttgaaatagattgttgtattacgattatattatacgtgtaacattattattttgcaagggttttcaagtgaatcataattttgctctgtcatttcactgattattcaaaatgagatgagcaaaaatcttcagtgcagatggagcaatacttgagattcttaagaagaattgtgtgagataaggttccttaagtctattaaaatacgaagaacctttgggtaatgggaatgatacctgaagtattttaacagagcgtaagctctttatttttttgcacaaaaaaagccccttgagaaattctcaaggagcagtggaatgactacttgctcgttgcatcagacatttttttgaattttgctgaaataatcgtatttagattattatgtccatcgcgttgttcaatcgtcaacgttaaaatatctccatcaatagagtatttatacgtagtttctttagcgacaggtccaatggacatggttgcaagttgcacaatgttgatagcttctgggaagataatcgtttggtttgctgtatctaatttaccgttcttcaaaacagaatgaattttagcattacctctatcaaattcataagttgtattgggcaagtccttagcgccatcctgtagattgactgataatttaataaattgatttttaatatattcgtctttcgtttgagtcactttagatgcatctttttgttttaagtaatcgtagaaccttccaaaaccatctgctagagatacagtatagtcgaattcaacagatgtatctgtaatgttcaacgttggttttaaatctttccatgcctcaggatagatcagcttgatagccgaatcatcattgtcaaaatctttaaaggctaagctacgttcaagagctggtcggaagtcgatggcttgccattttccttcaattggaacggggtctttttgagtagtgcttcctttacgtttgaagtgtagttcatagtgaactggaagattatttttcttcgcttttccgtcaatcgtgacataaagcatgtcgtcttttaatttgtagtgatatgtgtttggcgaaacgcgattttcaccgaatgagaagaagaatgagtttgctacggaaagtccttcatcaaaggtcattgttttggcaccttgatcaatagaacccgttgcttcgtagctaaacacgccagtatctttattcatgctgactttgtatttcttaaagtcgcctgcaaatccttcatgagagtcatacatgatttttttgaattcttcttcagtcttgcctctagcttctgttgtgacagtggagaaagctttaataaagttatcaatgttatagtcgtatttaatggttgccgtgttgttttcaatcttcatgtccattttgaagtctttaacagattcaagcaagtgtgcaaagtggattccatggagggtataggctccgatggactccgttaaagcatcgagagtatcgactaattcccattcgccatcaatcgtttcgacttttggtgtttctgttttagcggcatttttagagccgctttgttcttgagaacaagaagctagtgcgaaaactgagagcagagcaacgaatgataaaaataattttttataacgtctaatcatcgctagacctccttaaaatagatgattgtattacgcttatattatacgttcaacacaattgttttgcaagggctttcaaacgaatcacaattttgttttgtaacttgaccaattattcaacataagaaacgggaaaattgtatgtagcagagtccccaatagatgagattctcaaggcttcctaaattatttttttgcacagaaaaaagccccttgagaaaatctcaaggggcagtgagctatttaattagttttaggatctgaaactttcttgaatttcattggataaacaagatgagcaccagtttcatcgtacgttttctcagcatacattgtaaggatatcaccattcaattcgtagtgataagtaattggtacgtctgtagaatttatataaagtggtagaactccaaagatgtttggaacttcagggaatacgatcgtttttgcattctcgtttaaaaccccatcatttaacgttgcagttaacacttttgtattgttatcaaacgttccagtttgatgtttaaaacttccaaatttcttttctcttacgcctagaaggatggcagtagcttcttcttttgtaggatattcatctttattctgttcagcataaaaatcaatatacttattcatatcagcgctataagaataagttacatctgttcctgtaatttttagagtcggaacgatatcttggaaggcttcagtaacctttaatcgactattagcatcatcataataaattaagaaagtacgttccactgtatctctaaaatctacagctttccagtctccttcgagtgagactggggtaggtgctactgtggtagtttctgcaactgttgtagtctcagcggttgtttgttgtttctgttgctgttgtttctgttgcccacatcctgatacaaatagaagagcaagaagggaaaacatccatagggaactttttttcatattgttcatgattgatcactccttctaatgattgtcttctacgtaattgaaacgaagacgtattactctaaaatgactttgttcatctttaccttcagcataaagtgttagttggttaccttcaacggtgtaagtataagtaattggtacaagtgaattatacgtggttcccataacaattctacttaaaaatgtaggtgtttcagggaacgtaatagtatgtttctgtgtatcgatttctccagttagagagtaatcataggcatcattaggttcgtcaagagtaatctttgtatgtttcaaatttggaatataattcttaaattcagcagttttattttttaaatacgattcataattcgctttgttctctcctgttgcaaatgcttgatcctcatacagttttctgtaatcaaaatggtacttcaattcaacggttttatctttaatggtcatcgtcatcttaaccttatcgaagtcatcaagcattagtacagcggcaagttttttgatattagaagctaggaatactttttgaatggtcatttgttggtcagtccatttccaagttccttgttgatcctttgtaagatcttgtggtgctttgattgtttgaggagatttatctgtttgagaagacttatttgttttagaagactgcgatggagaagactgacatcctgcaataaggagcactgcaaagaatgccaagaaaccgaaaaggatcttctttgttttagtaaacataaatttacctcctaaacgttgttgctttaattttatcattaaaggaaataattataaagtgaaatggtgagcgatagaagaagaagggactgtataataaaaagaaaggttggcgatgagggcaaccattcaacttattctaacgaacgctagtgagaaccaggatctttaaaaaacacattctatttatggtaccgaaggtatcattttttgctataatagactgtatgagtagaattttagacaatgaaatcatgggcgatgaagaggccgttgaacggacgttgcgcccgcaatatttacatgaatatatcggtcaagataaggtcaaggaccagctgaaaatctttattgaggcggctaagcttcgggatgaggcgctggatcatgtccttctttttggccctccggggcttgggaaaaccaccatggcctttgtcatcgctaatgaactgggcgtcaatctcaagcagacttctggtcctgtcattgaaaaggccggtgacttggtagctatcctcaatgatctagaaccgggggatgtcctctttatcgatgagatccaccgtcttcctatgtcagtcgaagaagtgctttacagcgccatggaagatttttacatcgacattatgattggcgctggggagagcagccggagtgtccatctggaccttcctcctttcactttgattggggcgacaacgcgagctggtatgctgtccaatcccttgcgtgctcgctttggaattacggggcacatggaatactatgagcaagatgatttgacagagattgtcgagcggaccgccgaaatctttgagatggaaattacccacgaagctgccgaagagctttctcttcgtagtcgtgggacccctcggattgctaaccggttgctcaaacgggtgcgcgattttgcccagattatgggcgacggcttgattgacgataccattaccgacaaggctctctctatgctagatgtggaccatgaaggactggactatgtcgatcaaaagatcctgcgtaccatgattgaaatgtacggcggtggcccggtcgggcttgggactctatcggtcaatattgctgaagagcgagagactgttgaggacatgtatgagccttacttgattcaaaaaggctttatcatgcggacccgaacagggcgcgtggcgacccgcaaggcctatgaacacctgggatatccctacaatggagactaaaagaagatgctgacggaagaagtgatagtagaacagatccaagcggatccggagatgatgactgtcttggccattattcgagatctcgacttggcagatgcctggttagcagcgggcgcggtgcgaaatttcatctggaaccagctttctggcagaccagggtttgatgcgacgaccgatatggatctggtcttttatgaccctacgatcagctatgaggagactttccagatcgagcaagaattaaagaagacctatcctcagtacgcttgggaagtcaaaaatcaagtctatatgcaccagcatagtccggggacggctccttatcgcagtgcttgtgacgcggtttctaaataccccgagcagtgtacggctcttgcggttcgcttaaggaaagaggatcagctagagctctttctcccttatgggacaaaggatatcgaagacttcattgttcagccaactccgcattttttagccagtccagagcgtttagcggtttatacagagcggatgaaaaagaaaaattggcagagtaaatggcctctattagaggttcgttttccaaaatagagaaacagatcagatttgaaaaaggaatctgatttttctttaaaatgatggagccactttgtcatctttctgtcacatttttgttataatagtaatagtatgctggttttccatagtgaaaagccaagagctcagctaggttgggcagtccgaacaaggagttagatggaatcatgaaaaaaatcgtctttgtctgcttaggaaatatttgtcggagccccatggcggagtttgtcatgaaggacttgacggatcagtatgagattgaaagtcgggccacctctagctgggaacatggcaatcctatccatcggggaacccagaaaatctttcaacaataccaggtcccgtatgatccagccaagacttctttacagatcaaggaagaggatttttacaactttgattggatcctggggatggacgaaaacaatgtagcagatctaaagcaaatggctcctgcagggacagagcacaagattcatctttttgctgctgaaagtgtgccagatccgtggtataccggtgattttgaagagacctattccagagtcctgagtggctgtaaggcttggttagatcagttagcaacttcttaagagtttgatatgtgagagaatacagaatatgaaagaattttatgagacttataaggtctatctgacacgaaaaaatttagaaatagcagcattagtcgtgattattctatctgctttgctggttttcctttcagccattccaggtcagggcgtcttgaccttggataagggggcgatccgttacgacggaagtttggtccgtggcaagatgaatggcaagggaaccgtcacctttaaaaatggggatacctatacaggtaacctcgtcaacggctcttttagcggctatggtaagtttaagtccaaggatggttggacctatgaagggcagtttgttaacggccagccggagggcaaaggcaccttaaccacagaagccaacgtcgtatacaaaggaacattcaagcaggggatttatcaaaatgcgcattaaatggttttcactagtccgtgttacaggactcttattggtattgctttaccatttcttccaaaaagcctttcctggaggctttattggggtagatattttcttcaccttctcaggatttttgattacagcgctcttgatcgatgaatttgcgcgcaagcaaggaatcgactacctggcattcttgaaacggcgcttttaccggatcgtaccaccccttgtctttatggtattggtcgtgatgccctttacctttatggtccaacgggactacgtggctggtattgggactcagattgcggcggtctttggttttgtgaccaatttctttgagatggcaacgggtggtagttacgaaagcaacttcattccgcatctcttccttcatacctggagtttggctctggaagtgcattactatgtgctctgggcacttttggcatggttcttggctaagcgggctaagacggttggaaagtaccgaggcatgctcttcctggcatccagtgggctctttctcttcaccttcttgtccatgttcatccgcgcctttctgacagccaatttctctactatctatttttctagcttcactcacatcttccctttctttgcgggatcatgcctagcaacggtgacagggattgccaatgtcagcccgaactttacaaagctggtgcagtcttggagcatgaaaaagaccttatcggtcttgggtggaagctttgccttcttgtttgtgctcagtcttttcttgccatttgatagcttgtggacctatctgtttggctttttagcagcgacaatcgcagcttgtgccatgattctgtcggcccgcattctccatgaaaagacgccagataaaaaagaaccagccattctcaatttcttggcagatactagttatggtgtctatcttttccactggcctttctttatcatcttctctcaacatttgggaaatatgatggcagcccttgtgacgacgatcgtttccttgattctaacggctctgtccttctatattttggagccaaccattgcaggtaaggaacctcgggtctttggtatgaagatggatctcagttttttgaccaagccgatcttttacctcatgattcctctggctctcttgatggtcggaatctccgcctttgcaccaaccgttggagcttttgatgagagtttggtagtgagtgggctcaatcaagcagacagcaaaatgcaggtcacacggacgcaggtggacaatgcgacggcaacagactataacgtctcaaatggtgtgactatgatcggggattcggttaacttgcgagcgcaggactatctaaccaaagcgatcccgggcatccagattgatgcagtggtgagccgtcagttggaaaatggaatgaaggtctttgaaaccgatatctccaataaagttctcctaaaaaatgtggtcattgccctaggaaccaatactgtaagcaactacaaagaattgctggatcagtatgttgagaaacttccaaaaggccgtcgcttgatccttgtgacaccatatgatggtcgctatgccaacgatcagtccagtgaatcggttcaaacccgtctttatgaattggaactagccaagaaatacgactttatcaccattgcggactggtatcaagtagcaattgaaaatccaaacatttgggtgggaacagactctgttcacttcaatatggaaaccaatggtggggaactctatgctcaaacagtcaaagaagcccttgataaggccgaaaagggtccggtcaagaagtaaaactgcttctctgaaactgaaacaaaacaaatcctaacaaaataaaacaaaaagcaactttttacttgtaaaaagctgctttttttagtaagattaagaaaacgcttacataaatcaattgaaaatatcactttgtgaagaaaaaaattttttaattattttttcacaattttgctaaataattgctttcacagcaataggattgataaaagtttcacaaacttcaaaaaattctttgtgaaagttgcttggaagtgtttacaaaaatctcaaaatagagtacaattatattgtgaaataattaacaaatcgaaatttcttacactattcttgaaaatttccgaaaacatgaaaaagttctagaaaaggataagggtttcaaacattggaggaaagcatcaaatggctgataaaaaaactctctcacctgaagaaaagaaactcgctgctgaaaaacacgtagacgagttggtgcaaaaagcgctggtggcgcttgaagaaatgcgcaaattgaaccaggagcaagtggactacattgtagcgaaagcatctgtagctgctcttgacgcacacggtgagctcgctcttcatgcttatgaagaaactggtcgtggggtctttgaagacaaggcgacgaagaacttgttcgcttgtgaacacgttgtaaacaatatgcgccacaccaagacagttggtgtcatttcagaagatgacgtcactggtttaacgctgattgctgagccagtcggagttgtctgcgggatcacccctacaaccaacccaacttcaacagcaatctttaaagcattgatctctttgaagacacggaaccctatcgtctttgccttccacccatcagctcaagaatcatctgctcatgcggcacaaatcgtacgcgatgcagcgattaaagcaggagctcctgaaaactgtgtgcaatggatcacgcaaccatctatggaagcaactagtgcccttatgaaccatgaaggagttgcgaccatccttgcgaccggtggtaacgccatggtaaaagccgcttattcttgtggaaaaccagctcttggggtaggtgccggaaacgttcctgcttacgttgaaaaatcagccaacatccgccaagcagcacacgatatcgtcatgtctaaatcatttgacaacggtatggtctgtgcgtctgaacaagcggtcatcatcgataaagaaatctacgatgagtttgttgaagaattcaaatcttaccacacttactttgttaacaaaaaagaaaaagcccttcttgaagagttctgcttcggcgtaaaagccaacagcaagaactgtgcaggtgcgaaattgaatgcggacatcgttgggaaaccagcagcatggatcgctgaacaagctggcttcactgtaccagaaggaaccaatatccttgcagcagaatgtaaagaagttggcgaaaaagaaccgttgactcgtgaaaaattgtcaccagtcatcgctgttttgaaatctgaaagccgtgaagacggaattaacaaagctcgccaaatggttgaattcaacggtcttggtcactcagcagctatccatactgctgatgaagaattgaccaaagaatttggtaaagcagtcaaagccattcgtgtgatctgcaactctccttcgactttcggtggtatcggggatgtttacaatgccttcttgccatcattaacacttggatgtggttcttacggacgcaactctgttggggacaacgttagtgccatcaacctcttgaatatcaaaaaagtcggacgccggagaaataacatgcaatggatgaaacttccttcaaaaacatactttgaacgtgattcaattgaatacctacaaaaatgtcgtgacgttgaacgtgtcatgatcgttacagaccacgctatggtagagcttggtttccttgatcgtatcatcgaacagcttgaccttcgtcgcaacaaggtggtttaccaaatctttgcagatgtagaaccagatccagatatcacaactgttgaacgtggtacagagatcatgcgtgccttcaaaccagataccatcattgctcttggtggtggatcaccaatggatgcggccaaagttatgtggctcttctacgaacaaccagaagtggacttccgtgacttggttcaaaaattcatggatatccgtaaacgtgccttcaagttcccattgcttggtaagaagaccaaatttatcgctatcccaacaacatctggtacaggatctgaagtaactccatttgccgttatctctgataaagcaaacaaccgtaaatacccaatcgcagactactcattgactccaacagttgccatcgtagaccctgccttggtattgacagttcctggatctgttgcagcagacactggtatggacgtcttgacgcacgcgacagaagcttacgtatcacaaatggctagcgacttcacagatggtcttgctcttcaagctattaaacttgtctttgaaaacttggaaagctcagtcaagaatgcggacttccattcacgcgaaaagatgcacaatgcgtcaacgatcgcaggtatggccttcgccaatgccttcctcggtatttctcactccatggcccacaagatcggtgcgcaattccacaccatccacggacggaccaatgccatcttgcttccatacgttatccgctacaacggtacacgcccagccaagacagctacatggcctaagtacaactactaccgtgcagatgaaaaataccaagatatcgctcgtatgctaggacttccatgctctactccagaagaagccgttgaagcttacgcaaaagctgtatacgaactcggtgaacgctgtggtatcgaaatgaacttcaaagcacaaggcatcgatgaaaaagaatggaagaaacattctcgtgaattggccttccttgcttatgaagatcaatgttcaccagccaacccacgtcttccaatggtagaccatatgcaagaaatcatcgaagatgcttactatggttacaaggaacgtccaggacgtcgtaaataagacgccaaggaacaactgatgtttatcagctacccccactcgaaagagtgggggatttttgctatttgggtccaaaactcgttttttcataaaaaattagactttttttcagaaattgtgttatttttatagcattccgagctattttatgttaccctatagtgtgtgaatctgcctgtagctgaagggttatgatcctttttcagttatagaaaacgaaaaaacaaatccaagaaaggaggccatctcaaatggagttagaaggtgacgtgcaaggaagacaagatcaggcacagaaaattattgaaatgcctcaacgagatcgggaagcttccacttcagaaaatcagccatcatctgcttcggtggtctccatgtatgggcaggaaaggccaagcatttctagcctccatcagcaactggcaggcgcgtctggaacccagaccatccaattgcgagaggaattggtgctggcggtagcgcagaatgcttcagcgcaagcaactgtctttgaggcagaagttaaggataagctggaagaggccaaggagacggtttctcataaggtcgctgaggtgtcacaaatggcccacagcatggcccaatttttaacagatgcagaagtggagcaactattaggagagttctccatggatacttgttgggaccaagcagtagaggcggaaaacctcgcccaagcaaaggcctactccactcgcttgtcagatttggcaggtcagctggaggctgcatcagctcaattggtggacttggacaagggacaagcgacggcctttgatttttcataagtaggagaaaaagatgttagagatcctgggagaggacagagaacgaattgaggagctccatcgagagattaaaaaggagcaagagcggattgcgatcagaagtttgattgcaacgcaaaaagccttgatgatgttggaagggatgagtttgcaggtaaccttgggcggtcaatccgaaaagatgcgctcttttgctacaacgaccctcgttagtgatttgaaagatggatttacaggaggagcagcggacgcggtagaaacagcactgaaatcagtgaagaagccgattttattgagtccgattaaaggaggtatgtgatgtaccattcaggaaatagtgaattagaacaactagaagatcgacattaccgcttcaaccagaaacttagcgagttggagtgggattatgcggatatgcgtatggatgtccgccaacatacagaaaatttagtggactggctaagtgcccttcattttcaagcgccaagtgcggaggcccaaagtggcttggagcgtttatttgccttgcaagaagagtttgaggcagaactcaagcgctatgaagagcgtttagaagaagagcgtgagcgcgagcagcaagagtactacaagcagcgccaacaattagaacaaggtgattgaaacattcctctggtagagataagaggaatgtttttgtttgctcaaaaacttttaaaaatgtgctcataaattcttgcaagcgcttacttagtatgttataatattcacaaagaaacgaaaataaaatggttttatcaaaccaacaaaaaaggagtcgcttatgaaagctgcaacttatgtatctgcaggcaatctgcaactgctggatcaaccaaaaccagtgatcaaaaatccaacggatgccattgtgcgtgtcttgaagacaaccatctgtgggacagaccttcacatcctaggaggagatgtgccagcttgtaaagaaggcacgattttaggccacgaaggaatcgggatcgtcgaagaagtcggcgatgcagtgaataacttcaaggtaggcgacaaggtcatcatctcttgtgtcacagcttgtaatacctgctactactgtaaacgtagtttgccttctcactgtgaagatggtggttggattttgggtcacttgatcaacggaacccaagcagagtatgtccacattccacatgctgatggtagtctttatcatgcacctgaaactgtggatgacgaagccttggtcatgctctcagatattctcccaacctcttatgaaattggggtcctcccatctcatgtaaaaccaggcgataatgtctgtatcgttggagctggtccgatcggtcttgcagctctcttgactgtgcagttcttctcaccagctacgattatcatggtggacttgtctgaatctcgtcttgaagcggctaagaaatttggggcaactcataccatttgttccagcgatattgctgaaataaaagcctttatcaatgaagtgaccgatggccgcggtgtcgacatctccatggaatgtgtgggctatcctgctacctttgatgtctgccaaaacgtcatctctgtcggtggacacatcgccaatgtcggtgtccacggaaaaccggttagcttcaatttggatgatttgtggatcaagaacattaccctcaacactggtcttgtcaatgccaataccactgaaatgttgctcaatgtcttgaaatcaggtaagatcgatgcgaccaagctcatcacccaccacttcaaactttcagaagttgaaaaagcctatgatgtctttaaacatgcgggtgaaaaccatgcgctcaaggtcattatcgaaaatgacatcagtgaatgaagtggcaactaatttttgttcatagtttttttagacgaggctgggacaaaagtcctagcctctcaattatttttggattgtcgagcaagacgcagtggttgagtgggctctactacgctgatttcatcagtttttacagccctactcaactgtgcggaggtgggacgacgaaatcgaattctaacgaattaccgatttctgtcccactctctattttcaaccccaaatagcccatgattccttgcaaaataaatttgttgtcttataatagaagtacagaaaacgattacataaagagaaaggtgtgatcttatgaaacggttttgttatcatcgtgaattctggatggacttccatttctggatcttggtcttgcttttagtggctgtagctttgacgatgcgggctccgctttcggtagttagcctggcttatcttgcttttgttgggattttgatccttcttcaggtctttcaactgcctgtatcgacacggcagtacccagaaggtagctaccatttcaattggaccttttatcgggatacccgactgtatatcgatctctctttgctagcaggtctcttggcaggcccaatggcttcatcggatatgatctattggattttgcttggagccgtcgtcggctctatcggctttgtatttgtcgtaaaggaaaaagcgactcaaaagatggcctaaggaatcaccatgtcctagatctctgaaactagtttcagagatctttttatttttccctaaaatgtgaaactataatccaattgcacgattaatattgtaagcgctttaaaaatagattataatcaatttacaagtactcgagttgccttattatcaaaggagaaggagttatgtcaaagattacaaaagatgaactgattgaacaaatcaaagatggcatcattgtttcttgtcaagctctccctcatgaaccgctctatacagaagcaggaggagtcattcctctcttggtcaaagcggctgagcagggtggagctgtcggaatccgagccaatagtgtccgggatatcaaggaaatcaaggaagtgaccaagttaccgatcattgggattatcaaacgcgattacccacctgaagaaccctttatcacggctactatgaaagaagtcgatgagttggcagctttggatatcgcggtcattgcgcttgattgtaccaaacgtccgcgtcatgatggcctttcgattagtgactttatccatcaagtcaaagagaaatatcctgaccaactcttgatggctgatatctctactctggaagaaggattgacagctgtcgaagcgggagtggactttgtcggaacgaccctttcgggctatacggactacagtccaaaggttgatggtccagattttgaactgattcatcgtctctgccaagcaggagtagatgtcatcgcagaaggcaagatccactaccctgatcaggccaagaaaatccatgatctcggtgttcgtggtatcgtcgtaggtggcgccataacccgaccaaaagagattacagagcgcttcgtcgcagccttaaaatgagaaaacaaaacagtagattgaaggaggaggagaccgaatagagagtagtcgaatctgaaacatgaacaagaataggcgtcctcattgaggataaccccctgtaagagtaatcttaccgcaatcgtgaggagaaatcacatgaaaatgaaaaaagtattgtgctcgttggtagctggtgcagctcttctagcactcgcagcttgtggctctggcggaggatcaaaatcagaatcttctggaggaaattctggtaaaacagaaattacctggtgggcattcccagtctttactcaagaaaaagcagaagatggtgtcggaacctacgaaaaatcaattattgcagcttttgaaaaagcgaatccagatatccacgtgaatttggaaacgattgacttcaagtcaggtcctgaaaagatcacaacggctattgaagcaggaactgctccggatgtactctttgatgcacctggacggatcattcagtatggtaaaaatggaaaattggctgatttgaacgatctctttaccgaagattttgtcaaagatgtcaataatgaaaatatcatccaagccagcaaggcaggcgacacagcttacatgtatccaattagttcagcaccattctacatggcgatgaataagaagatgctcaaagatgcaggcgtgttggatcttgtcaaagaaggctggacaacagacgactttgaaaaagtcttgaaagcgttgaaagacaaaggttatacaccaggatcactcttcagtaacggtcaaggtggagaccaaggtactcgtgcctttatcgctaacctttacggtggttctgttactgatgaaaaagtaaccaagtatacaacagatgatccaaaatttgtcaaaggtttagaaaaagcttctaaatggattgaagatggtttgatgatgaatggttcccaattcgacggtggagcagatatccaaaactttgcgaatggccaaacttcttacaccatcttgtgggcgccttcacaaaacggtatccaagctaaattgttggatgcaagtaaagtcgaagtagtcgaagtaccattcccgtctgattcaggtaaaccaaaattggaataccttgtcaatggttttgcagtcttcaacaacaaggatgaaaagaaagtagcagcagctaagaaatttgttcaattcatcgcagacgacaaagaatggggtcctaagaacgttgttcgtacaggtgccttcccagttcgtagttcatttggtaaattgtatgatgacaaacggatggaaaccatcagtacttggactcaatactactcaccatactacaacacaatcgacggctttgcagaaatgcgtacactttggttcccaatgttgcaatctgtttcaaacggggatgaaaaagcagaaccagctttgaagacctttactgaaaaagcaaacgaaacgatcaagaaaaaatagatcatctatgaaactcaaatgatcctttcatagaaataagaaagcataggccccctcgatttcttatctccatgtgtagattgaaagagggggtcttcgtgttttcgctctcctaattatcatatgtaggaaggggcagtgccatccgttccacataggaatcaaggaaaaaatagaaaaagaacactaggaggtgccttgctgtgaaggtaaacaaaatccgaatgagggagacactcgtttcctacgcattcctagcacccattttaatcttctttacggtctttgtcctagcccccatgattatgggctttgtgacaagtttcttcaactattctatgacatcctttaagtttgtcggtttagaaaattattcccgcatgtttgcggataaggtctttgtgaagtccttgatcaataccgtcatcatcgttatcggctcggttccgatcgtagtattgttctccttatttgtggcttctcagacctatcatcaaaatgcgattgcgcgttccttctaccgtttcgttttcttccttccagttgttacagggagtgtagcggtaacggttgtgtggaaatggatctatgatccactatcagggattttgaactttgtattgaaatctggacatgtcatcaaccaaaacatttcttggttgggggacaaacactgggctttgatggccatcatcattattttgttgaccacttcagttggtcaaccgatcatcctctacatcgctgctatgggaaatattgataattctctcgtagaagcagcgcgtgtggatggtgcgacagaatttcaagttttctggaaaatcaaatggccaagcttgttgccaacaaccttgtacattgccatcattacgaccattaactctttccaatgtttcgccttgatccaattgttgacatccggtggtcctaactactcaacgagtacccttatgtactacctctatgaaaaagcctttaaactatctgaatatggttatgccaacaccatgggcgtcttccttgcggtgatgattgccattatcagttttgcgcaattcaagatcctcggaaacgacgtagaatactaaagaaaggagcctcagatgaaaccaacacaaaagaaacccatcactgcctttacagtgatttcaacgatcattttgctccttttgactgtcttgttcattttcccattttattggattttgacaggggcctttaagtctcagccagataccattatgatcccacctcaatggtggccaaagacaccaaccatggaaaacttccaacagttgatggtacaaaacccagccttacaatggttgtggaatagtgtcttcatctcccttgcaaccatgcttttggtgtgtatgacctcttccttagcaggatatgtcttggctaagaaacgcttctatgggcaacgaattctctttgctacctttatcgcagctatggcccttccaaaacaagttgtcttagttccattggtacggattatcaactttatggggatccatgatacccttgcagcggttattctaccattggttggatggccattcggggtcttcttgatgaagcaatttagtgaaaacatcccaacagaactcttagaatctgctaagatcgatggttgtggagagttgcggactttctggagcgttgccttcccaattgtcaaaccgggatttgcagcccttgccatctttacctttatcaacacctggaacgactactttatgcaattggtaatgctgacctctcgtcaaaacttgactatttcactaggggtagcaaccatgcaggctgaaatggccacaaactatggcttgatcatggctggggcagccctagctgcagtgccaatcgttacggtcttcctggttttccaaaaatccttcacacaagggattaccatgggagcggtcaaaggataagtcgtctgtttggacaaatgatagttgtgtacagatcggttttctaggctgagaagtatcgaaaggatgagaatatgatatttgatgatttaaaaaacatcaccttttacaaaggaatccaccccaatctagatcaggccattgactttctctatgagcatcggaaggattcttttgaattggggagatacgatattgatggggataaggtctttctcgtcgttcaagaaaataccctcaacaaagcagaaaatgatcgctttgaacaccacaaaagatatgctgatttgcatttattagtagaagggcatgagttttcgagttatggatcccgtgtgacaggtgaggcgctcgcatttgatgaagcatcggacatcggttttgtccattgccaggagtcttatccgcttcatctaggctatcataattttgcgattttctttccaggggagcctcaccagcccaatggctatgcagggcaagaagatatcgtgaaaaaatatctatttaaaattgcgatcgattgatcacgttagaaaggagtgcctatgtcatctaagggggcaggattgatcaaaaccgtttttaacacggacaatgtagtgatgcgtatcagtgagaagatcctcgacttggtaaccgttaatcttttatttgtgctaagttgtttaccagttttcacgattggaattgcgaaaattagtttgtatcagaccttatttgccattaagcaccagcgtcgtgttccggtgattcgtagttatgcgaaggcttttcgggacaattggaaaataggcttgcaactaggaagtttagaactgattgttgcaggtatttgtctctttgatttattcttattttgggggcaaacttccctagctttccaagctttgaaaaccatttgtttaggcctctttctctttcttgtgttgatcttattggctgcttatcctattgcggcccgctaccaattggattggaaagagtgtttgcaaaaagccatgattgtgacaggcttacattttccttggttcttcgtcatgggaagtgctctcttacttctatgtatggctcttgcaagctcggttttagctttcctattgggactcatgatctttttcttgttcggcttttcaagcttggtttttgcacaagttggattaatggaaaagatttttgcccagtaccaagaataaaatgaatttattagtgacaaaaggagaaaaaatgtcagatttaaaaaaatatgaaggagtcatccccgctttttacgcctgctatgatgaccaaggagaaattagcccggagcgggtacgtgcgctggtagaatattttatcgcgaaaggtgtgcagggcttgtatgtcaacggatcctctggcgaatgtatctaccagagcgtggccgaccgcaagctgattctagaagaagtgatggcagtagctaaagggaaattgaccatcattgctcacgtagcctgcaacaacaccaaggatagcgtggaattggcacgacatgcggaagaattaggagtggatgccattgcggccattccaccgatctatttccgcttgccagaatacagtgtggcccactactggaatgaaatcagtgcagccgcacccaatacagactttgtcatctacaatatcccgcaattggcaggggtcgctttgacaccgagcctttacaaggaaatgttgaaaaacccacgggtgattggggtgaaaaattcttcgatgcctgttcaggacattcaaacctttgcttctttaggaggcgacgaccacattgtctttaacggcccagatgaacaattcttaggtggccgtctcatgggagcacatgctgggatcggtggtacctatggtgcgatgccagaactcttcttgaagctcaatcagctgattgttgagaaagacttagagactgcgcgtgccttgcagtttgccatcaatgacattattggagtcttgacatctgctcatggcaatatgtatgcggtcatcaaagcggttttgcgcattaatgaaggtttggacttgggatctgttcgctcccctttgacgccagtagtaaaagcggatcaagaagtgattcaacgtgctgctcaactcattcaggacacaaaagccagattcctttaatcaaaggaggtctagatgaatccatatgttgtaattgatatcggagggaccagtatcaagtatggtctagccgatgcaaaagggcaactcctagagacccatgaaatgccaacggaggctcaaaaaggaggacctcacattcttaacacaacaaaggaaatcgtagcccgttatttgaagaagcatcccttggcaggggtggcgatttcttcggccggaatggtagatcctgataagggagaaatcttttatgccggcccacaaattcccaactatgcaggcacccaattcaaaaaggaaatcgaagagacctttcagatcccttgcgagattgaaaatgatgtcaactgtgccggtctcgcagaggtcaccacaggccatgcaaaaggatcgaacaatgctgtttgtctgacgattgggacagggatcggcggttgcctcttgctcgatggtcaggtctttcatggctttagcaattcagcctgtgaggttggctatcttcatttgccagatggtgcctttcaggatctagcttcaacgacggctttggtcgagtatgtggcagaacatcacggtgatcctgtggaacagtggaatggccgccggatctttaagcaggcaacagaaggagataagatctgtatggctggaattgatcgaatggtgacctaccttggcaaaggactggccaatatcgtttatgtggtcaatccagaggtcatcgttcttggaggggggattatggcccaggaagccatcctcaagccaaaaatctatcaagccctgtgtgccgaactggttcctagcctagcagataagatccgtttggaatttgcccaccatcaaaacgctgcgggtatgttgggggcctactaccactttagacaaaaacatgaaacataaaacaagtcgcgctggcgacttgtttttgattcatcaaaaaaagcatgaaagatgaagaaaaccagatctttcatgctttttaaatagggagaccatattaagattttcgagaacgttgactagaaagttttttgttttcccagtagctattaaagacaatttccttttgttctcggcttttattaaggaaatgagcatagatcaaatcgaccacaatgaggagtggtaaaatagcagaaattcgatcgatataggtactactaggaagaggtgcggccggtaacacttctgtgaatccttggtggatggcagccgggttagccgtcacaagaaccgttttagcccctttttctttggcgtccaggagactgtctgtaatggagttggtgcctcctgacaatgagaaaccgatgactaaacaagaggaatcgagaatgctggtcgtccaagcaaagccatcttgatcagtcagggcttcacaaacgacgcccagtcgcataaagcgcaatttcatttctcgagcgactaaaccggaactaccgatcccgaagaaatagactcggtctacttgaccgattagttcagctacccgatctaattgggaatcttttaccagactttcagtgacgttactgatatggtggtagcgttgcaagacgctgagagtgagttcgtcatgcacttgcacctgtttttgatttttggtttcttcgttaaaatgatagacaaactcccgatagccggaaaaaccacatttttgagagaaacgcgttaaagctgcctttgaaacatggagtaactccgttacacgagaagaggacagggagtgctgtcgtgcttcggatgataaaaaatattgggcaatgtcgcgttccatatctgttaactcagcttcatggctggcgataatggcgcgtaaatcttggtcttgtttcacagcaatcctcctttctcacgagatgaaataacaggatactcctataatatattacacattataacatgggtaaccgctttattcaagtaaaagaaatcaagaaatactgaaactaggaacaggataggagaaaagaagagaacgcttccaatcctggcagtagtggcttgttggttatccacaattttctgaaaatttccggttgggcctgaacaaacgatatgaattgtggtataatttaagataattgtactgttgttggaagaacaatggttgaataaggaggtgtgacgatgtcgaatgcaacactcgagatgatgcaagagatcgagcaagctgctcagggcgtgatcgtaggctatgaagctcaagttgaacaaatccgaacggattcgcgcgatcgacttgcaacagtggcacagcattacgatgaggaaaccaagcaattggtcacagaggcagaaaaaaacgcccaggaaagactcgtccgtttaacgaaagatctggaagaaacggttgcgcgcaatgatgccagggtacaagaggcgatgaccgataaacgagctgggctagttgaagccattgtagaaaaggtggtagcaagctatggccgttagtcagatgcaaaaactgtccctcatcttgcccaaagatgacttggacagtctcctactagcgctacagtctgaggcaaaaatccagatttatgacctcagtgagcatgaagaatggcaggctgcctttgaggcaaataccttgtctcaacccttgacagaggacaatcgtcaagctttggtagagctgcaaaaacgtcaagaacaagttgaaaaaatgattcagactctggagccttatatgcctgagaaaaaggccctgcaagccctgaaggaagaacccttaagcttgtcttttgatgacttgcaggcccatgggatgattcgagatgaggatctcctattgaccaagttgaaacgccaattgcgcgtgttagacaaggcttgtcagaagattgcggatgcaaagggagagatagagcgcttagaaaaatggcgaccgttagaggtgacgccagctgctctcgctaattttcactatgtgcatggcttgatcgggaccattcccaatagcgatacagacgctgttcgttcttccttaaaagctcatcctgagctggagttagaagaagtctttacatctgaaaccgaacacggctatgtcatcttgtatcgttcaggagatcgtgtagctgttcaggagcttctagaagaccatggattcaaagaattggactatgaagaagagcaggtcccggccgcctacttggatcgcctagaaggggaaatcaaagagcaagaagctgtagttgcagcaaccctagccgagttacaaaactcccagaaggagctggaccagctcaagtaccagatggattacttgctgagttcgggagctcgggaggaagccaagtcgcttcttgccagcacgcaaagcttggtagctctagaggggtggattgaaacctcccaagtggcctcattacgagacttcttgaaagaaggttttggttctcgggtcttactagagacacgcgatgtgacggaaaaagattgggatgacgttccgatccagttgcgaaataatgccttggtagagccctttgaattagtcacagagatgtacgccctgcctaagtattacgagaaagatccgacaccaatcgtttctctcttctactttgttttctttggcatgatggtcgcagatatcggttatggactgttgctaaccttggcgacaggctttgcccttaaagccttcaagctcaagcctggtacagccaagaaccttcgtttcttcagtctcctcggaatttcagttgccctttggggtgtggtctatggctctttctttggatttgagatgcctttcgccttgatcagtacgaccagcaacgccatgaccatcctgatcctctcagtggtctttggttttatcaccgtcttagtgggcctcttcctaggaggaatgaaaaatgttcgcctcaaagactacaccgaagcctataatgctggctttgcttgggtcttgatcctacttggcttaatgcttctagcagtaggcaatatcttgccagggatgagcgttctagttccgattggcaagtggctggctattttgaatgccattgggatcttgattgtttccattgtcagtgccaagaagttgtccggtctagcctctggtctctttaacctctacaatgtcagtggctatgtcggagacttggtcagcttcactcgtttgatggccttgggcttgtctggagctagtatcggttcggcctttaacctcattgtcaatctcttcccaccgcttggacggtttacggtagggcttctgctctttatcgtcctacatgccattaatatgttcctgtccttcttgtcaggatatgtgcatggagcccgtttgatctttgtggagttcttcggtaagttctacgaaggaggaggcaagccatttcgtcctctcaaaccttctgaacgctatattaaaacaaaaaaataagtattatctttaataaataggagtatattcatggaatctttagcatcatatttttcagcccatgggggcgccttctttgcagcgtttggtgtggcgatcgccgttgcacttagtggaatgggatctgcccttggggttggtaaaacgggtcaagcagcagcagcactcttgaaagaacaacctgaaaaatttgcccaagccttgattttgcaattgttgccaggtacacaaggtttgtacggtttcgttatcgggatcttgatctggttgcaaattaagccagatatgccacttgaaacaggggttgcttacttctttacagctcttccagttgcgattgttggttatttctcagccaaacaccaaggaaatgttgcgacagcagggatgcaaatcttggccaaacgccctgaagacatgatgaaaggggttatccttgcggccatggttgaaacctacgccatcttggccttcgttgtgtccttcctattgaccctacgcgtcggctaagagctagctttgatggattcgcctttcgaggcgaaaaacacaagacgcatgcaataggagaaaaaacgatatggatgaacaaacccaattaaaggattcgatcttggcccaagcccacgaaaaagggcgtaaactcttagaagaggccaaggaaaccatcctaaaagaggagactgcacaagaagagcgtttgatccaagataaactcaatcaacgctccgagcagctcaagcggattcaacgtcaattgcaacgtgaaacccaacaaatcgaaaataaaaaacgccaatcaacccttgtcaccaagcaacgagtcttaaaggatctctttgcagatgcttatgaagcgatggtggcttggccccttgaaaaggaaatgcagtttgtagatgcggtcttagatcgctatcagggacaagttgtgaccctgaccttcggggcggtgagcgctgctaaatttgattcagcagctctcgagagattgaagcagacgcatcagaatgtgacagttgcagatgcaacaatcccagctcaagcaggttttgtcttgtcggttgggaagattgatgacaactatctctacagtgatttggtggattccatttgggagcaagaaagctaccagatggcagccagcattttcacagatgaagagaactaggaggttgcaatgagcgaacggacctattctcaagtcaatacaggaatcagcgtacgtgaggctagttttgtcagtcccagtcagttcgagcagttgcttgcaagtccctcaagcgagagccgagaaggcttgctacaagggacaccttatgctctagatagcaaggagatcaaggatttatcagccctggaagctcacttaatggcagccttgttggcagaataccaatgggcttttgaggtaagtcctcagtcggacttggtcagcctctttaccttgaaatacacctatcataatctcaaggtttatctaaaacacaaggcgacagagcgaaagttggggcacttattgatccctatcggaccttattctctcgatgtgctcgagcatttggtggcgaccttttctgcggagcattgtccggcctttatggcggaagaagtggctgcaacctggcaagaattccaagactatcaggacttgcgggtcctcgaaatagggatggacttagcttattttaagcacctgagatacttaggggacagcctagatcatctgattctgaagcagttggtggacgtgaccattgacttttacaatgcgattacggtcaagcgggccttggatcagcaaaaaccgcatagttttatacaccaattactctcagatgaagggagcctcagtgcccatcaggtgatcgacctgctagaatccggccagtggttgacctggttttatcaagtcaatccgctggagtacgatctcgccttagagacttatgaagaaaagatgcgcaccggtcaactaaagaccgtagagttggagtatttagagagtttggtgaaattcagtcttctagacgctggccgttttgaagtcgatggacccctaccccttgttcgttatctttacggaaaagagttagaggtgactaaccttcgtttggtcctctctggtttggacaatggttttccgctagcagacatcaaagaaaggatgagaccgatttatggacaaacagacctataagatcgccgttgtgggcaatcgggacgccatccttccttttcgcttgattggctttcaaacctatccggtcacagagccgcaagaagcgatcaataccttgcgaaaactcagtcgggaaaacttcgggattatctacctgacagaggatattgctcaggccattccagatacagtagctttttacgaccagcagctgacaccggctctgatccttatcccgacccatagagggactacaggactgggccaacagcggattcgtgataatgtcgaaaaagcagtaggacaggatattttatgagaacaaatgaatttggccaagcgattggcgatgcactgccggattttacaccggggcttctgccagctattgagcggatcgaaggtcgctataccgtgatcgagcgcctctcaaaagaaaaacatggagcagatctttatcaggtctacgggccggactctccagcagcgatgtggacctttctgttcaaaggccctgcccacaatgaagaggagtgggaccatctattagatgatctcatgacagcccaaggtcgcttttactatgcgattgtagacaaagattcaggcaaggctttggggactttctctctcatgcggatcgatcaagccaaccgggtgatcgaagtcggagcagtgacctactcaccagcgctccaaaagacacgcatggctacggaagcccagtatctgttagcgcgctacgtgtttgaagatttaggctaccgccgctatgagtggaagtgcgatgctttaaaccaagcttctcgcaaagcagctgagcgcttagggttcacctatgaaggctgtttccgtcaggctgttgtttataaaggtcgtacccgtgatacagactggttgtctatcattgaccaagaatggccagctatcaaacagcgcttcgaaacctggttggatccaagcaatttcgatgccaatggccaacaaaagcaagctctaagagagatagcacaaaagtaaaacaaagaaacaaaggattcccaggaggaatacatgactcaaggaaaaattatcaaagtttccggtcccttggtggttgcatcagggatgcaggaggccaatatccaagacatttgccgggtcggcgatcttggtttgattggcgaaattattgagatgcggcgggacgaagcctctatccaagtatatgaagaaacgtctggagttggtccaggagaaccagtggtcacaaccggagctcccctttctgttgaattgggaccaggtttgatctctcagatgtttgacgggatccaacgccccttggaacgcttccaagaagtgactgccagtgactttttggttcgtggggtgcaagttcccaatctagatcgggacaccaaatgggcctttgaaccaagcgtgacagaaggaacagaggtggttgcaggagacatcgtcggtaccgttcaagagaccaatatggtggaacaccgcatcatggtgccctgtggagtcagtggacgtgtgaccaagatcgcagcaggttcttacacagtagaagagccagtctatgagatcgagcaggcagatggcagtctctttactggtactttgatgcaaaaatggccagttcgtcgaggccgtccctttgcacaaaaactgattccagtagagcctttggttaccggtcaacgggtcatcgataccttcttccctgtgactaaaggtggagctgcagctgttccgggtcctttcggagctggaaaaacagtcgtgcaacaccaggtggccaagtttgccaatgtagacatcgtaatttacgtgggttgtggggaacgtggaaatgaaatgacggacgttctgaatgaatttccagaattgatcgatccaacgaccggtcaatccatcatgcagcggaccgttctgatcgctaatacttcgaacatgccggtagcggcgcgggaagcttccatctacacagggattactattgccgaatacttccgtgatatgggctattccgttgccatcatggccgattcgacatcgcgctgggcggaagctcttcgtgaaatgtctggtcgtctagaagaaatgccaggggatgaaggctacccagcctaccttggtagccggatcgccgaatactacgagcgtgcaggtcgggtcaagacactcgggaccactgcgcgtgaaggttcgattaccgccatcggtgctgtttctcctccgggtggagacatttcagagccggtcacgcaaaataccttgcggattgtcaaggtcttctggggcttggatgctcaattggcgcaacgtcgtcacttcccagccatcaactggttgagttcttattcgctttaccaagatgaagttggtcgctatattgatctacatgaacaaatcagttggtctgaaaaagtgacccgcgctatgaatttacttcaaaaggaaagtgaattgcaagaaatcgtccgcttggttggtctagattccttgtctgaaaaagaccgcttgaccatgaatgcggctaagatgatccgtgaagactacctgcaacaaaatgcctttgatgaggtcgatacctatacctctttcagcaagcaggtggccttgttgacaaacattttaacctttgaccaagaaagtcaaaaagcattagaattaggggcttacttcacagaaatcatggaaggaaccgtggctcttcgagaccgcattgcccggagcaagttcatccatgaggatcagttggcaaccattcaagccctgaaagaagaaatcgtagaaaccctacaccaaatcgtcgcaaaaggaggagtagacaatgagcgtgattaaagaataccgtactgtcagcgaagttgttggccccttgatgattgtcgatcaggtcgaaggggttcactacaatgaactagtagaaatcaaactccatgacggaacgacccgtcagggacaagtcctcgaagtccaagaagacaaggccatggtccagctctttgaaggatctagcgggatcaacttggaaaaagccaaagtccgctttaccggacgtcccctagaactccctgtgtctgaagacatggtcggacgcatctttaacgggatgggcaaacctatcgatggcggtccggagattatcccagagaaatacttggacattgatggacaagccatcaaccctgtttcacgggactatccagatgaatttatccagacagggatctcagccattgaccatttgaataccttggttcggggccaaaaactcccagtattctcaggttctggtcttcctcacaaggagttggcggctcagattgctcgtcaagcaacggttcttaattctgaagaaaacttcgccgtggtctttgcggccatggggattacctttgaagaagccgagttctttatgaacgaccttcgggaaactggggccattgaccgctcggtcctctttatcaacctagccaatgacccagctatcgagcggattgcgactccccggatcgccttgacagctgccgaatatttggcttatgaaaaagacatgcacgtcttggttatcatgaccgacatgaccaactactgtgaagcccttcgggaagtatctgctgcccgccgggaagttccaggtcgtcggggttatccaggttacctctataccaacctctcaaccctctacgaacgtgcaggacgcttggttggaaagaaaggatctgtgacccagattccaatcctctctatgccagaagatgacatcacccaccccatccctgacttgacaggctacatcaccgaaggtcagattatcttgtcccgtgatctctacaatagtggttaccgcccaccgatcaatgttcttccgtccctttctcgtttgaaggacaagggttctggtgaaggcaagactcgggaagaccatgcggcgaccatgaaccagctctttgcggcttacgcccaaggaaaacaagccaaagaactagctgtagtgcttggagagtctgccttgtccgataccgacaagctctatgttaaatttacggaccgctttgagcaagaatacatcaaccaaggctttaccaccaatcggacgattgaggaaagtttggatctcggttgggaactcttatccatccttccacgaacagagcttaaacggatcaaggatgagatgattgacaagtatcttccaaacaaagaggattagcctatggcacgattaaatgtaaaaccgactcggatggagcttaatattctcaaagagcgcctcaagacagcaacccgggggcacaagttgctcaaggacaagcgggatgaactcatgcgccgctttattgaagctgtacgtgagaataatcgcctgcgccaaaaggtggaggcagcgctggtgggcaatatgcaagatttcgtgatggccaagtccttagagagcgacctcatggtagaagaaatcttcgccgttcccactcgagaagtgatgctccatatcgaggaagaaaatgtcatgagtgtgcgcgtgcccaagctccatgcccgtatcgaaaatccatacggagatgatgaaggagacgtagtttatagctacctcgcctccaacagtcaaatggatagcaccatccaagaaatgggggatctactcccagatttgctcaagttagcggaaatcgaaaaaagctgccaactcatggcagatgaaatcgagaaaacccgccgtcgagtgaacggactggagtatgcgactatcccagacctcaaagagaccatctactatatcgaaatgaaactcgaagaagccgaacgcgccaacctcgtcagaatcatgaaggtaaaataagatacaaagccgttaagcaactcaaaggaaaataggaaatccaacgacgaagcgtccgcttctagttggatttatctttttccaaagagttgtaggcgtgttcagttataagatacaaagcccgtaaaatgcaaagtgaaaatagggagcaggacagaagcactgttgtatagaatgcttcgttgtcctgcccccacaaggctgattaggatttttccgagctcttaaagcgagagaaaaatccaatcagctactgtgtctttgaagttagtactattacagtttgcgtttatcacacagcatttagggcgtgttcagttataagatacaaagccgtaaaaagctatgttcaattacttaaaaaatacaagaacctcatcgaggaaccgctccttgatgaggctttttttgcgccctcgaactcttcttccaggaccctaattttatgttactagtttgtaacaatgtgacaagaaagacgaaatgttacaagaaaaatacagttttgttaaatagccaaaaaggccttttattatttttaaattgtgataagatagtatggtagttaatttgtccaagaaaatcttgagcaaaaaaacaaagaaaaaagaggataaaagatgaaattaaaagttaatacgaaagccttgatcgcttcaacagtagctcttgcagtgattccatttacaaaagccactgcagaaacacttgaagattgggtagctcgctcagtagatgaaatcaaacatgatatccaacaaagcggtgaaaaccaacaaacttataccatcaaatatggtgatacattgagttcgatcgcagaagcgcttggaatcgatgttcatgtgttggcaaacttaaacaacatcagcaacatggatttgatctacccaggtactgtattgaaaacaacagtaaatgatcaaaaagaagtaacttcagttgaaatccaaactcctcaagcaggtgcgacagatgcaaccgttgcaagtgctgacttgacaacaaaccaagtgacagttgatgaccaaacagtcgctgtcaacgatttgtctaaaccagtaaacgaagataataaagctgtaccagttgctccagcagcagaaactcaagaagctccagtagttgaagtaccagcaacagaaacaccagcacaaccagctgttccagaaacaccaaactacggtgctccagctgtcaatgttgaagtacaaaatcaagaagtagcgccagctgctgctcctgaagctccagcaactcctgaagctccagctgctcctcaatctgctccagtagcagaagaagctccagcagcacaaccagcagcagaaacgactgcagcaccagaagtgcaaccagtagcagaaacctcaacgagcggaaatacgattccaaatgatccacaccttcaaccacaagcagaagctttccgtcaagaaattgcagcgaaattcggtatcacaaacattggtggttaccgtgcaggtgatccagacgatcatggtaaagggcttgcagtggacgtaatggtaccaaccagttcacaactcggggatcaagttgcccaatatgctattgacaacatggaccgtgcaggtatctcatatgttatctggaaacaacaattctacatgccagtagacaacatttacggaccagctaacacttggaaccaaatgcctgaccgtggtggagatacagcaaaccactatgaccacgtgcatatctcatttaacggataataaaacattgaactaggcctagagcctagttcttttttgtgtgcacaaaaaaagccggaagacgaatcttccagccggacaatggttataaaatatgatcgactttttccacctgataaagggcaatcgccatgataatggttaagaccagtagcatgaggatagctggtgtccaagagtggaagagagatttgctgtagccgaagaggatgggaccaaaggctgcaaagacgtagcctcctgtttgggcaagaccggaaagttgagctgttttttcaggtgtgctggatttcatagagaaagcgaccatgaggtaagggaaaagggaactaacggaacttccaatcagggcatttaataccaaccagtagaagaagttgctggtcgggattaagagcatggctacccccagaatccctgctccgacaacaatcgtcagcatcaagcgtcgattgcgatcggataaccgtgtcgttaaacttgggatcgtcaaggagaatgggagactgatcagggtgaacacggaggccagtagtccagattcaacctttgaaaggccagcttgaacagccatggtcggaagccaggtcatacttgtgtagaaaagcagtgactgcaagcctccaaaaatcatgatagcccagacatatttattggtataccacttgctactagattccgtagtagcagcctttttgagtcggtggttgtagcgaaggttaggaatccagatgaccaaagcaagagcacacaaggctgtcaagatgttgaccaaaccttgccaagaagtggctttggtgatcggaacagcgacagaagaggcgatcgctgtggacatccccatagaagtgatgtacaaagtggtcagaatgcctagttggcggggtctgttcgcctgaatcaggcttggaagcaacacattgagaaaggcgatgccagctccaatcaagatggttcccagatagaggaaggggaggttgataatccgaatggcagatccgatcgtaatcgcgatcaaaactagaaaaaagaggcgctcaatccccaactttttagcaaattgaatcgcaaaaggtgagaaaatggcaaacgtgagaagtggtaagctagtcaatagtcccagagagctcacatctacccccaaaccagcagcgatgtcagacaagaccgtcggaagcgtagtaaatggtgttcgtaaaacaatcccaagcataatgatgcccgggatgaatagcgtagaatgtgtttttttcataaatcctcctcagacaaaaattcccttcattataacatagatcgagcataaattggagtatttgtacaaatgaagggtaaggaccgtagttctcactatcgttcgaactgcgtcaacgtacctaaactcgtctatgcccctattgaacttgactcactatgaatcgtaaggaacgtagcgttcgaactgcgtcaacataactaagctcattaacgtttgctaaggtacgtagaaaaagccaccggttttggtggctcttatagggagattattatgaaaaagtttaggattttctatcaaacaaagttaggaggtctttatttgatggttttattataaggcggtttgcttaaagaaaacttaagaaaagattgtgtttaaaaaataggtcttaagtctgacaaaatgcattaatcatcattccaaacagtaaaattacttattccattctaaggatcgtagttctcgctaacgttcgaactgcgtcaacgtacctaaactcgctgatgctcgtaaaggtacgtagaaaaagccaccggttttggtggctcttatagggagattattatgaaaaagtttaggattttctatcaaacaaagttaggaggtcttcatttgatggttttattataaggctgatttcttaaagaaaacttaagaaaagacgctgtttataagaatcggtcttaggtctgataaattttttacaacagaaactatttagaattttttctaaatagagttgacaaagccatccgaaagtactagaatctatttagaaagaaatctaaatagattggagaagatagagaatgaattttgcgcaaacatttaaagctttatcgaatccgataagaagaagtatcttagagctgctaaaggcagggaaattatccgctggcgatatcgctggccactttgatgtagcaggagcgaccatttcccatcatttaagcctcctcaagcaggcagatttaattcgagaggaaaaagagaagaattttatctactatgaactcaatacttctgtcttggaggatttaatggtctgcctcgttgatttgaaaggagactctactgatgaaaacgaataaaaaactattgctattaacttctatggtgatccttttccccatgctttgggggctgatgatttggtcgcaattgcctaaccaaatcccgattcatttcaattttgctggccaggccaataacttccaatcgaaacccctggttgtgtttggtcttcctattttcgatctcatggtgcatctgtttatgatctttatgatcggacgtgatcctaagaatagcgctatgaatgaaaaaatgattagagcgatttactggttgaccccaatcgtttccttaagtacctcctatctcatttatagcaaggcgctaggatctactaccaatccatctgtttttgtttcggtgttgctgggtcttatctttgtgatcatgggcaattacatgcctaagttgaaagtgaatcacacggttggaatccgtctgccctggaccttgcagagtgaagataactggcacaaaacccatcgcttggcagggaagttgtgggtcctcggaggcttgatccttctgcttgaagcaggccttcaattcgccctttcttatgttttggcgctggtcatcctcgccattgtccttatccctgtgatgtactcttatcaattaagtcggaaaaatcgttagtatgaaaaacaaccagagaagaagccagtcgggaacggtttcttttccggttgtttttgcttgttcatcgtttcaaatttaaaactttcaggaaaatacttatttttcggaaagaatctattaggagctgatatactatgctatactatatatagcagtttatctttttttgaaaatttaggttatggtttttatgagtaaaaaaattctctttattttatagtttacgaggtgaataaattaagaaaaaaatatatttgaagggatgggtaggataccctattttgatacaatagggaaaaatgattcgactctaatatcgtttaaaaaactgaaaaatttggttgtgaaggagtgacatatgcaagaatttacaaagataactattgaaaaagactacttaccttataggaagatagaactaaattggttgaagaaagaaagcaatccggatactgaaatactcagaagtatgattatatttggaagaaatggaacagggaaaagtactatttctaaatctatttctagtttaagagacataagtgaggatattacccttattaatgaaaaaaatagagtgagtaacacgataaatattactgatagagataaagaaactatatttgtatacaatgaagaatttcaaaatgaaaaagtaacttttatagaaaatgaaagatttgaagcaattgttcttattgatgatcaaaaagatttaatgtcgaaaatagcgttaaacaaaagtgaagtaaaaagattagagtctaaattgactcaatataacgatgctctttcaactgctgaaaatgacataaaagaaagtattgtaggcacgaaaaaatcaaggtggaagagtatttttagtgaattaaatgataaaaatccatactttaatgctagtttaataaatagaatttctagttctgtatcttcaagatcagtggtagaattaggggagaatcttagtaatctgataaaagaaatagaatcagctaagaatgaaaaaaggattaacagatgttcggaagtagaaattcccattaatgaaataaaaaacaaattaaaaattattgctgagccagttagtatgatagagctaaccgagagagagaatcagattattgaaatacttggaaataatgttgacagtagtatagaaaaaacagaaaatatattaaaagggaattcaaataattgtccaacatgttttcaggaaatcaacgaggattataaacgagatactttagctcaattaaaatctgttttgaaaaaacaattgttaaataatgagatatctgaacatatgactggtatagagacagctgagaaagaggaaaacttctattctacgcaacttacaaaaatatatgactttgcttgtattgaggatgaggaatgtgattttgcaaaagaattttctccatatataggtaacgttatgagacgagtgttggaagctttttccacatttaattatcaaaaagggatatcagagttaagttcgaatgaagtattattaagtgaatcgattgatgatagagaggagagagagcttctaaaatctcatatgtatagattgcttttgaatggagaaagccactattcagataaaatttatggaataactgaaagagatagagaagtattgttgacaattaaacaaaagattcaaacagctagatttgtattagttcttttatatagtcttaatccaattcatcttaaataccaaatcaataatttagatcaaacaatattagaaagatggaaatcggatcttataggtagtaaaaaataaagataccatttctactcatcataaagttgaaaaagtttctccttttaaaacaatttgaatgaaattttttcaaattatttaagtaagtgaagtacgtttaatgttgttatactatgattctgaaatatgttaaaatacttctctatcaaaccaggtcttaagaaagctcgtaaagcatcacaattatcaaaacgttaatcaacacgcttatatcaacgtttacagacatttaagaaatttctcttggatgtctttttttgtctagctaaattttacaaattgggcaatttaggttactcaataatataaaaaagataaaaatttaaagttcgaattttaattttaaaaaaagtaattattattgaatatctgttcaaacattttttcttttctaaggttaatataagtatatatactttaaaaaaggaagtcaaacatcttgctcatagatttttgcatttttaaaaaatacattttgtcatataataatgtggaaaattgacggattccttacataatcatataatatgaatatgtaaacccttacatactattctacttatacttgataaaatgcaagttcttgaggatctataaatatatagacactcttctatttataaagtgaaataaagaatcacggagaaagtttatggatattaaagagacattcaaccagctagacaatacaaaatttaatgatttcaataatcgccttgaaggttttgagaaactttttaaagacaaatattattttacccatcccgaagattttagctcaatctttagcattttggtaaagtatggaaaaagtacaagtaaatatattttatcgaaaggagagatatatgagtgaaatagttattaatgctcagaatttatctaaaaatttttataattttgattcaagactcccatttatcaagagatttttgaaacgtaatcaaataacgattcgagctgttcaagatattagttttacgattaagagagggagtatagttggctttattgggagtaatggagctggtaaatccacaacgattaaaatgttgactgggactctttatcctagttccggaaaattagaagtgaatggagaaattccatttaaaagaagtataaattttagaaaaaaaatttcaatagtagtaggaaataaattacagttatttcaagatgtttcggctatggattattttcaattgattggtactttatatgaggtagaaccggcgattttacaagaacgaattcaggaattaagcaatttgttgaatgtaaaagatcagctttaccagcaggtccggaccctctctcttggacaaaaaatgaaaatggagtttatcgcggcatctttaacaagtccggaaatattatttttagacgagcctactatagggttagatatacagtctaaaaaagatatcagaacatttttaaagaaaatgaatgaagaatgtcatactactattattttaacgagtcatgatatggatgatatttcgtctgtttgtgacgaattaatcgtcattgacaaaggaaaaattattttgcaggagtcaatggatgttattttatctaaattttctgattttaaatatttaaagataaaaatgacattagatttggtaccagagttatgctctgttaaaggagtagtagtcatttctcaaacaaaatcggaatgtatactaaaaatacctagagattttgtctttgagacattagaatcaatcaataagcttgtagatatagaagattttgaaatatcaaatctttctttagaagaaattattttacaaaactattttacaaaaaaggagcacaattgaaaaaagaaatgtctattattctgatatcatttcgatctattttgaactataaatcaagtgtactattgttaatgttacaggcaagtatacaaattatgatatcagtatttttatggacgtatatatatcagagtaaccagataaatatagcaggatatgattttacctcaatggttcaatactatttggggactataattttttcatattttgttttttatccagttgattgggaaatcaatgacgatgttcattcaggaaatttttttagcatattaataaaacctgttactttttataagtattatttttgtaaaatgcttggagataggcttgctcatttattatttatcatcattcctgtcattttattctccagtgtttattacaagaatgagttattaaccattgaaattcttatttcaggaagtattgcaattattctatctatggttctatggtttttaatatcatgttgtgtaggtatgctttctttttggttagaaaatatattttttgtccttactgttaaagaaatagtaattcagtttttatcaggaatattattgcctttaagttttttttcaaataattttcgtctgtttttagatgtattaccttttaaatacttagtatatgaaccgcttcagatgtttagtaatgatacatataaattaatagactatttgagaattatttgtattcaattgatttggtgcatcattttttatattatatcaagattcatattgagaaaaggagtggagcacttctcaaatgtgggaggataaaatgtttagaataaaagtaatttttaggctacttcattttggttttaaatctgatatgaattttcattttgacttcttttgtggtctattttcgtcgatactgtggattggtttacctattgtattttttagattgattttcttaaacatagactcttttaatggttgggactattatcaaattttatttttggtaggttcctacactattgtagatggagttatgatgggattgttaattagaagtatgggaattttagaatcagatattttgagtggtaacttggatcaaattttattgaggccgtttgatactcagttgttctatatttttagatcatttaatttagttcaattcgtgaatactttttttggtcttgcgatcatttttataagttatggaaatttaaatgtacatttaaattcattaaaaatattattttatatcctttctttaatgtgtggttgtattatatattattcaatttggtttctaataacgattagttcattttggttcccaactaaattttcaaaagtagatgtatttttgaattatattggaatttctaagtatccatataatatttttacaggtattaacagattgatcactatgttatttgttcccaatttattaattgccaatcctgcagtattaatatttttagggaaagatacattgaacctatttttctatcaaatagtttttacagtttttttgattattatcagtcgtacaatttttagaaaaggattgaaaaaatatgaaagtgcaggaagataaacaatgttgttcagttatatgtttgactaaaggaagtgattcgctgtactttgttttgtggtcattgaaacatcagataattataaactataatttaaagaatagtattattaacttataggtgctaagaaaaaatttaaagaaattccctcattcaatcaaacttattcatattttttaaaataagaaaatagttggattttgatgatggttgatataaagctaaactgaaagtacctgaaatacaactgtgtcaaaccaggtcatacgatctgtgagaaaaagaacacataacaaaaagaggagcttcacaataaagttcctcttcttttatatatccgaatcattattcttatttcaaaaaaggtagtgaaaaaggtagtgattcggttgatttatattgcaatgtagtgaaatttagaatttcaagaatcgcttaaaatcaaggtttctaacatctattgacgtgtagtgaacccctatttcacctcagtaaatacaacgtgtttgcgaagttttggtgagtatttcttcaattgaagacggtctggagtgttacgtttgtttttagaagtaaggtacaagcgttcaccagattctttgtgttcaagtgtaatatttacgcgcatggtatctcccttctattattcagctgatgcagctttagcgatcttacgtcctttgtagtatcctttaagtgatacacggtgtgaacgtgagtaatctccagttgcttcgtcaaagtttacagatggagctgttactttgtagtgcgtacgacgtttgtttttcttcgcttttgatgtgcgacgtgcaggtactgccatttcgtttttctccttttaagatataaattcaattaggtttgattttcatcaactttaacagtataacaaaacttttttgtaaagtaaagttacttgacaaaaaaattgaaatttttgaaagaaacttttctgttgtctgttcctccaaagtccttgcctatctttgtggcctcttttatgctataatggtaaaaaatgaaacgagaggaatgacatgacagaattagacaaacgccatcgtagtagtgtctacgatagcatggtaaaatctcccaaccgtgccatgcttcgcgcgacgggaatgaccgatgaaagctttgaaaaaccgattgtcggagtgatttcgacatgggcggaaaataccccttgtaacatccaccttcatgattttggaaaattggccaaagaaggtgtgaaagatgcgggagcttggccggtccaatttggcaccattacggttgcggatgggattgctatggggactcctggtatgcgcttctccctaacgtcacgtgatatcatcgcggactctatcgaagcggctatggggggtcacaacgtggatgcctttgtagctatcggaggctgtgataagaacatgcctggttccatgattgccattgccaatatggatatccctgcgatttttgcctatggtgggactattgctccggggaatctcgatggaaaagatatcgacttggtttctgttttcgaaggaattgggaagtggaatcacggcgatatgacagctgaagaagtgaaagatcttgaatgtaacgcctgccctggccctggtggctgtggtgggatgtatacggccaataccatggcgacagcgattgaggtccttgggctaagcttgcccggttcctcttctcaccctgctgaatcagctgataaaaaggctgatatcgaagaagcaggtcgtgcggttgtcaagatgctggaaatgggactgaagccatctgatatcttgacccgtgaagcttttgaagatgcgattaccgtgaccatggcgctgggtggttccaccaatgccacccttcacttactcgcgatcgctcacgcagctaacgttgacttgacgcttgaagacttcaacgatttccaagagcgtgtgcctcacttggcggacttgaaaccttcagggaaatatgtcttccaagacctttataatgttggtggtgtgccagccgtcatgaaataccttcttaagaatggtttccttcatggggatcgcatcacttgtactggtaagactgttgctgagaacttggaagccttcgctgatttgacaccgggtcaaaaagtcatcatgccacttgaaaatccgaaacgtgcggatggtccattgatcatcttgaaagggaacttggctcctgaaggagcagttgccaaagtatcaggtgtgaaggtccgcaacatcacgggccctgctaaggtctttgactccgaagaagctgccattgaagccgttctttcggatgaaattgtggatggcgacgttgtcgttgttcgtttcgtaggtcctaagggtggtcctggtatgccggaaatgctatccttgtcatccatgattgttgggaaaggccaaggagacaaggtagccctcttgacagacggacgcttctctggtggtacgtatggtctcgttgttggtcacattgcgcctgaagctcaggttggtggcccgatcgcctacctccacacaggggatttggtaacggttgaccaagataccaaagaaatcaccatgcacgtttcagacgaagagttagcgaaacgcaaggcagaaacaaccttgccgccactgtatagccgtggggttctgggtaaatacgcccacatcgtttcttcagcatcacgtggtgccgtaaccgacttctggaatatggaacagtctggtaaacagtaattacaaggacgactttgtccaaagagagagtgggacagaaatcggtaattcgttagaattcgatttcgtcgtcccacctccgcacagttgagtagggctgtaaaagctgatgaaattagtgtagtagagcccactcaaccactgcgtcttgctcgacaatccaaaaataattgagaggctaggacttttgtcccagcctcttttttggctcaaagtcgctatttttaaccctgtcgctgaagcgtatgaatattactttttgggagatttgagtgtattatctgtcatttttcttgtaaatccgtctataatttgctataattgtgactaatcgaatcaatcctttaatactgtccagagaggcaggcaaggagctatggaaatgaaaggcctgggaagaccagcctatattttgtgtatctccttgttgtgggggatttttttgtatagttgaaaagtggtttgatgaaaaagagaaatcgtcgatgatggagcatgaagtactcctttacgatttggtcatcgaaggtagacgtttttgttcagccatagcttgtcgcatcttaattttaggaggtttttacgatcgtgaatgacgttaaatatgatgtgaatgatatgccaaaaccaggcttgctggttggtttatctttccagcatttgtttgccatgtttggggcgacagtgctggtgccgattttggttgggattgatcctgccattgctttgttctcatctggtttggggaccttggctcacttgacagtgaccaagtataagattcctgcttacatggggtctagttttgcttatattgctgctatgcagatgttgatgaagacagatggaatcgcagcagttgcccaaggtgccatggcgggtggtttggtctacttgtttgtagctctgattgttaagcatgcgggtaaagattggattaataaggtccttccaccaatcgtggttggtcccattatcatggtaattggtttgagtcttgcgaagaatgccgtcactgatgcgacaaccttaaataatagctacagcggctatgctctattgatttcgatggtgaccctctttgcggttatcctatttaacatgtatggcaagaagattgtcggtgtcgtcccaattttacttggattaattgtgggctatattttctcattggctcttggtttgctgacaggacatagttttgtcaatttctcagaggtaagtgcggcgcattggattcaagtcccaaactttgacattccatttgtggattatagctttaagctctatccaagtgcgattttgaccatggctccgattgcctttgtgaccatgacggaacattttggccatctcatggttttaaacagtttgactgagcgtgattacttcaaggatccagggcttgaccatacgcttactggagatggcttggcacagattattgctggattctttggagctcctccggtaacctcttatggggaaaacattggggtgatggcccttagtaaggtctactcagtttacgttatttcaggcgcagcagtgattgcggttgtcatgagctttattgggaagctatcagcactcttgcactccattccaactcctgtattgggaggcttgtctattgccctctttggggttatcgctgctagcggtttgaaaattttagttgaacataagattgattttgataataaaaagaatctcttgattgcaagtgtgatcctagtatcagggatcggtggtttgatgattgacctcggtggtcttcaaatcacgggtgtggcaacgtcgaccattctaggaatcgtgttgtaccaaatccttcctgaaccaaaagctgacgaggcttagaccattctggtagtgaaaaagtttgaatggattcaaacattataaaaacgaggaacaaactctgatggcagagttggtgttcctcgtttttttattatggattggatttccaaagaggcttttccttcattagttgactgcgtttcttaaatggtaatgattgttatcgtggtggaaggccaagggcgatgcgcccgtatcggctgattcgtgtaattttccaagcgggtgaccaagttacttcaaccttgacatcttcgatcccctcgatttcttttaggcgagcgacgatttcgatcggaaggctctcagcacagctacaagccgtatcggtaaaggtcataaccaccttgcaagtgccggcttcatctagatggatctcgtagatcagtcctaggttatagacatctaactcaacatcggtatcaaatacaagctccaatttttcgattaacggcttctctagtgccagggcgcggtcattgattttgatatcctctctcatcgcaagatcctttcagtgtagtatggcttccattttctcataattcggctgataaggcaagaagagaaagaagttttgaatgtgtcgaacgaaggaaattcggtccagcctccatttctcttcgaatttgtggtaaaatagatgcaaaagtaagacaaaggatgaaggctatgaaattacaaaaaccaaaagggacccaggatatccttcctggcgattcagcgaaatggcaatatgtagaaggctttgcacgcaaggtctttgcgcgatacaattatgatgaaatccgcacaccgatcttcgaacattatgaagtcatcagccgttcagtaggggatacgacggatatcgttaccaaagaaatgtatgacttctatgacaaaggagaccgtcatatcacgcttcgtccagaaggaacagctcctgttgtccgctcctatgtagaaaataaactctttgcgcctgaggtacaaaaaccaagtaagttctattacataggcccaatgttccgctacgaacgtcctcaagcaggtcgtttgcgtcaattccaccaaattggggtagaatgctttggatcgagcaatcctgcaacggatgtcgaaaccattgccatggcagcacaattcctgaaagaactaggaattgacaatgtgaccttgcacttgaacaccttgggaagccctgctagtcgtcaggcttatcgtcaagccttgattgattacctcttgccaatgaaggatcaattgtctaaggacagccaacgtcgcttagaagaaaatccgcttcgtgtcttggattcaaaagaaaaagaagacaaggcggcggttgaacatgctccttccatcctagactatctagatgaagaaagccaagcgcattttgatgcggttcgtcggatgttagaagacttgggggtagcctatgtcatcgataccaatatggtgcgtggcttggattactacaaccacacgatttttgagttcattacagaaattgaaggcaatgaattgacagtctgtgcaggtggtcgctatgatgggttggttgaatacttcggtggccctgcgacagctggttttggatttggtatcggtgtggaacggatccttctcgttcttgaaaagaaaggcattgaattaccgatcgaaacaggcctagatgcctatatcgccgtcctaggggatgaggtcaatgaagcagcgcttagcttggttcaagcccttcgaatccaaggtttcaaggcagaacgtgattaccttggacgcaagctcaaggcacaatttaagtcagcagatgtctttgcggccaaagccttgattaccttaggaagtagtgaagttgagagcggtcaagttactgtgaaaaacaaccaaactcgtcaagaagtaacggtaactcttgaaagcctgaagaaagacttcccatctgttttagcagagttgggattggcttgatcgaatctttcagacacttgtaaaacagattcacatgggagtaggagcaaagtcgttgcgcctactctcttttatctagcttctgtttgccgacctttgccaagatttggcgaaaagccgttaaattttctgacatttatgatataatgagaagactactagtaaaggaatgaaactgtcatgacattagtttaccaatcaacacgagacgaaaaaaatactgtaacagctagtcaagccatccttcaaggtttggcaacagatggcggcttgtttactccggtatcttatcctcaagtggagctagattttaacaccctcaaagacgcttcttaccaagaagtggctaagcttgtattgtcagcctttttggatgacttcacagcagaagagttggactactgtatcaccaatgcctatgacagcaagtttgatacgccagccattgctccgcttgtcaaactcgatggccaatacaacttggaacttttccacggttcaaccatagcctttaaagatatggctttgtcgatcttgccttacttcatgacaacagcagctaaaaagcacggtctggaaaataaaatcgtcatcttgacagcgacatccggggacactggtaaagctgccatggcaggttttgccgatgttccaggtactgaaattattgtcttttatccaaaagacggtgtcagcaaggtacaagagttgcaaatgaccactcaaactggggacaatactcatgtaatcgcgatcgatggaaactttgacgatgctcaaacgaatgtcaaacatatgttcaacgatgttgaactacgtgaaaaattggcagccaacaagatgcaattctcatcagccaactccatgaacattggccgtttggtgcctcaggttgtctattacgtatacgcctatgctcaattggtcaagacaggccaaatcacagcgggagaaaaagtcaactttaccgtcccaacagggaactttggaaatatcttggcagctttctatgccaaacaaatcggtcttccagttggaaaattgatctgtgcatcaaacgagaacaatgtcttgacagacttcttcaaaacacgtgtctatgataagaaacgtgagttcaaggtgaccaccagtccatcgatggatatcttagtgtcttccaacttggaacgcttgattttccacttggtaggcaatgatgccacaaagaccaaagagttgatggaaagcctccttgcaacaggtcaataccaattgtccaactttgatgcagatatcttagatttgtttgcggctgcatacgcagatgaagcagaaactgctgcagagatcaagcgggtctatgaagcgtctgattacatcgaagaccctcatacagccgtagcatcagccgtttatcaaaaataccggacccaaacaggggatgctgctaaaacagtcattgcctctacagcaagtccttacaaattcccagttgtggcagtagaagcggtgacgggcgagaccggtctaggcgatttcgaagccttggccaaattgcacaccctctcaggtgttcctgtgccaccggctgtagacggtcttgaaactgcgccggttcgccatcgtacaagcgtagctgctaaagacatgcaagcagccgtagaagactacttgggactgtaattctccctattagaaagatcaaaagagccgtttggctcttttatatacgcatgaatttatacaaaaaaatcttaaacattgcccttcctgccatgggtgaaaatttcttacaaatgctgatgggcatggtggactcttatttagtggctcacctgggcttgattgccatttcaggtgtttccgtcgcaggaaacatcatcaccatctatcaggccatctttttggcactgggtgcggcagttgccagtgtcatgtctaaaagcctgggtgaaaaaaatcaagaccacattgcctaccatgcgacagagtccctaaaggtgaccttgttgttgagtgctctcttaggaggggcttcgctgttatttggacgccagatgatttcgctgttgggaacggaagctgcagtcgccgaaagtggggggatttacctttccttggtcggcgggaccattgttctcttaggcttgatgacgaccctgggctcgctggttcgggtagccaacaatccacggcttcccatgtatgtcagcttgttgaccaatgttttaaatgctctattctcctctgtggctattttcctttttggttggggaattgtcggagcagctttggggactgtgctagcccgtctggttggtgttatcctcttgtggcaaaaggtccagctgccctttgcttcccttcgttggggattggatcgtaagctcttgaacttagcactgccagctgctggagaacggctgatgatgcgagctggagatgtggtgatcattgcgatcgtggttgcttttgggactgaggcagtcgccggaaatgccatcggagagaccttgacccagtttaactacatgccggtgtttggagtggccacagcgacggtcatgctcgtagcacgaagcctcggtgaaggggattttgagcagattgaccgccttcgaaagcagtcttactggctgtcctttgtattgatgttgcccattgctctgggtatctttttcgggggcacccttctgacccatctctacacacaagatgcgaaagcggtagaagctagcctatcagttgtcctcttttctttgttaggaacaccctttacagcaggaacagtcatctatactgctgtttggcaaggcttgggaaatgggaaacttccattttatgccacaaccattggcatgtgggtcattcgaattggagccggttatctgcttggagtaacccttggcttgggtcttccaggtgtctggacggggacgctgctggacaatggtttccgttggctgtttttgagtcaactttatagacgaaaaataggagagagaaaatgacaaaacgagcttttatttgggatttggatgggaccttgctggattcctatgatgctattctggcgggtcttgaggagacctatgcatcttatcagcttccgtttgaccgagcgagtattaaagactatatcttgaagcattcggttcaagatcttttagtagcggtggcagcagagtatcaactggatgtgacggacttaaatcatcgccgagcagaaagtctagcagagaaaaatgcccaggtccttctgatggagggggcgcgtgatgtcctgtcctgggcgaaggatgctgggatagaacaatttgtctatacccataagggagagaatgccttggtcatcctacgggacttgggcttagaatcctttttttcagagattttgaccagtcaaagtggttttgcccgcaagcctaacccagaagcagccaagcatctgatagagaagtacgggttgcatccgggaaagacctactatattggggatcggagcctggatattgactttgcaaggaatagccagattcagagtatcaatttcttgacgtctgactatgaaggtaattatcaggtggaaagtttactagatattccagctattttaaacgctgaaaagaatctgtaaagagattgttttcattttgaaataaagtcgtaagctttctttaagaaatgtccgctataatagaaccataaacaaagacctcctaactttgtttagaaaaatcctaaaacttttctttttcataataatctccctaagagtcgcccaatcaggcggctttttttgtgcgaaaaaacagtgccagctttttttcttgccaggatagaagaaaaagtttatgattgactaatcaattattgatttatcaaaaacgattcggagaaggaatatggcagaaataaatgatttactctaccaactacgtttggcagatcaatcgaccacacaactctttgaaaagcgactagggattagcttaacgcgttaccaaatcttgcagtatctattagaacaagcaccttgcaatcagatcgcggttcaggaacgcttacagattgatccagcggctttaacccggcatttcaaaattttagaaaaggaaggatttgtccatcggagtcgaaatccaaaaaaccagcgagaaatcttaattcatttgacggatatggcctataatcgtttggtcaaacatccccctcgctatcatgtggctgtgaaagatcagatgagtcgcattttgaccactcaagaacaagagcaattttcatacttgctggataaattagtatctggtattgaacaaataacgattgaataaaaaggagaatctacgatgtcattactgacgattattttagcgagtcttgctgcactggagcatttatgtattttttatttggagagcatcagaaccacatctgataccacaagtcgggttttcaacatggataaagaagaactcgctcgcccatctgtgacctctttatttaagaatcaagggatatacaatgccttgattggggtcttcctcttgtatggattgtttgtctctaaaaatagtgaagttgttacaatttttgtgctctttattattggagctgcggcctacggtgcgatgacagccaataaaaagattatcttgacccaaggtggtcctgcaattttggctttgttgagtatcctatttttaggataaaaaggacgggccgctagggctctttgagctgattttattaaattagtgtagaaaaaagtataaaaaaagactaaaaattttattgactttctaagaaaaagggttataatggtagcaacagaaaagtaatgagtcagctattttcagggagcttgtgggaattgtgaacaagcaatagcgactgatgaaaattggactgttatgattaatgaattctaacccatgtgaattcggttggcaccccttaccgtgcaactccttgatagaggagatagagatgtagggaaagaccagctatttttccctataaaagaggtggcaccgcggacactacgccctcacacagtttttgtgtgagggcttttctatgtgccttagcaagcgaagcgagcttaggcacattgatcccaaagcgagaattgagcgatgggatacccttgatcgccttagcaagcgaagtagggtgcggttgaattccttagaataaaagagttctagaagagaggtttctgatatgaaaaaagttttatctgctgatgtgttgagtccaattttggcttatatgcgtttggatgcgccccataaaatgatcttggagtcaattcctcgtgaaaaagagaatgcgcgtttttcaattgtagcctatcggccggtcagtgaagtcaagtttgaaaatggcgtcctctataacaatgatcaaattgttaaagaagatcctttggactttttgaatcgcatcacggtcaaaacgaaaacttccgaagagcttccttttaacggtggggcgattggatttgtcggctatgacttgattggtctctatgagaacattggttccattcctgaagatacgatcggcacaccagatcttcactttttcttatatgaaagctatgtgatttttgatcacaaaaaggaaaaggtctatgtggtggaagagaacctctatagtggacgaagtgaagcagagcaagcgtcgagcttggagcaagtattagcacaattggcaagacctgcaaaagaagagtttcaggacaaggatctgcatgcacttcatttccacaatcatttggagcaaaaagagtttgaggaaatggtggccctagcccgggactatattcgaaaaggggatatgttccaatgcgtgctcagtcaacgtttttcagctgatttttcaggaaaaccgctagattattaccgcaatttgcgcgtgaccaatccttcgaattatctctacttttatgattttggggagtaccaaattatcggtgctagtccagaaagtctggtgtcggtcaaggatcgagtggtgacaaccaatcccattgctggcacacgtcccagagggatcgatgaagagactgatcggcaattggcagctgagttgacaggggatccaaaagaagtcgcagaacaccggatgttggtggatctagggcgaaacgatattgggcgtatcgctcaaaatggatcagttgaagtgaccaaatatatggaagtggaattcttccgttatgtcatgcacctgacgagtgtggtcaaggggcaattgcttcctggactagcctccattgaggctttgaaggcaactcttccagctggaaccgtttcgggggctcccaagattcgagccatgaagcgaatctatgaagcagaaaaagaaaaacgaggcgtctatgcgggggccattggctatctctctgtgacgggggatcttgattttgctattgcgattcgaaccatgatcctcaaaaataagaaggcttatgtgcaggccggagcaggaatcgtttatgattcgatcgctgaaaatgaataccaagaaaccgtcaataaggcaaaatcgatgacaaggattggagaagaaggatgattttattagtagataattacgattcatttacctacaatttagcacagtatatcggaaaatttgatgaggtccaggtgcttcgaaatgatgatccggatctgtaccaagctgcccaagacgcagatgctttagtcttttctccaggcccaggttggccaaaggatgcgggcaagatggaggagatgatccgagatttcgcaggggtcaaaccaatcttggggatttgcttggggcatcaagcgattgcggaagtttttggagggcgcttgggattggcaccacaggtcatgcatggcaaacaaagccagatccagctagaagctccctctccgctatacgcgggtgtcgcaaaagaagtcccagtcatgcgctaccattcgctgacgattgaagccatgccagaggattttgtcattacctctcggacgacggatgatcaagcgattatgggaattcaacaccgcagcttaccaatttatggttttcaataccatccagaaagtatcgggacgccagatgggctcaagaccatcgaaaattttgtcaaactagtcaaggagcggaagatgaaacaagtgcttgcaaaagtagcagaaggaacggatctaaccagtgcagagttagaggctgctatggaggaagtcgttgctggtcgtgcttcagaagcacaggtgacggcccttcttctaggtctcaaaatgaagggagaaacggttgaagagcggacggctattgcaaaagtgatgcaggcctatgcagtcgctattcctacagaagttcaaggagcgatggacaattgtggaacgggaggcgatcgttcgtatagtttcaatatttcaacaacagctgccttcgtccttgctggtggtggcatcaagatggcgaaacacggaaatcgttcgatctcttctaaatctggttctgcggatgtgctagaagctctagggattaaccttgatttgggtccagaagatttgggacgagtgtttgaaaaggcggggattgtctttctatttgctaaaaacctgcatcctggcatgcgctatattatgcccgctcgcttggcgctaggagtgccgacagtgatgaacttaactggtcctcttatcaatccgattcctctagaaacccagctattgggaaccagtcgtccagatatgctggaaagcacggcagagattctaaagaatttgggtcggaaacgcgcagtggtggtgagtggtccacaaggtttagacgaggcaggtcttgatggggaaactcagctcgctattttggaaaatggacaggtgaccttatctagctttcaaccagaagatattggaatggagcgcatcgaaattgatcaagtacgaggtggagacgccaaacgcaatgcggaaattttgctcagtgtcttgaagaatgaagcgagtcccttcttagaggtgactgtcttgaatgctggccttggtttttatgccaacggcaaagtagattctatcaaggaggggattgccttggcacgtgaagtgattgccagtggggctgcccttgagaaattgagattattacaggagtatcaaaaatgagtcaagaattcttaccaaagattttaaaggaaaaggcgcgtgaagtggctgtgatgaaagaagaggagctccaacctttgcgtgagacctaccgcttgtatgattacctaaagagtcatccagataagcttcaggtcatcgcagaggtgaaaagggctagcccgagtctgggagatattcatgtggatgtggatatcgttgcgcaggctaatacctacgaagaaaatggagctgtgatgatttctgtcttgaccgatcaagtgtttttcaagggcagtatcgagtatctccgggaaatatctagtcaagtacgtatccccaccctcaataaagattttattgtggatgaaaagcaaataattcgggcgcgaaacgcaggggcgaccgtgatcttgttgattgttgcagccttgtcagaggctcgtctgaaggagctctatgagtttgcgacccatcttggcctggaggttttggtggagacccataatctgacagaactagaggtagctcaccggattggggctcagatcataggggtcaataatcgcaacttggtgacctttgagacagatctccatactagccttgaagtggcgaccaattttgaacaagaaccggtttacatctctgagtctgctatttttacagcggcagatgcgcgcatgctcgctccttattttaatggcattctcgttgggacagccctcatgaaggcagataatgtggctgaaaaagtaaaggagttgcagattgacaaaggttaaaatttgcggattatccaccccagaagctgtccagacagctgttgaggcaggtgcggattacattggttttgtctttgcaccaagcaaacggcaagtgacactagagcaagctcggcagttggctacagggattccagagagagttcaaaaagtcggaatttttgtatcaccacaaagagaagaagtggagaaagcttgccaagttgtgggcttggacctgatacaagtgcatggaccgatggatgatgccatcttgcaagagtttccccaacaaacgattcgcgctgttcaagtggggaaagatgcagcacttcctgataccagtgccgactatctgctctttgatgctcctgtagcaggaagtggagagacttttaactggaaaaagctcgaaagtcaaaacgttacaaagcccttctttattgcaggaggcttgacggaagataatgtagcagatgctatttgcttctttcatccttttgcggtggatgtatccagtggggttgagacaaatggaaaaaaagatcaagaaaagataaaacgatttatagaaagggtcaagcatggcatataaacaaccagatcaaaacggattttacgggcggtttgggggacgatttgtccctgaaactttgatgacagcagttttagaattagaagaagcctacagagaaagtcaagcagatccttcttttcaagcagaattggatcagcttctgaaacaatatgtcggtcgggaaacaccgctctattacgctaagaatctaaccaagtatgtcggtggagccaagatttttctaaaaagagaagatctcaaccacacaggggctcataaaattaataatgctctaggacaggttttgctggcacaccgaatgggtaaaaagaagatcatcgcagaaacaggggccggacagcacggtgttgcaacggcaacagccgctgctttatttgatatggaatgtaccatctatatgggggaagaagatgtcaaacgccaagcccttaatgtctttcggatggagttgttgggggcaaaggttcaatcggtaacagatgggtcgcgtgttctcaaggatgcagtcaatgctgcccttagagcctgggtagcaaacgtggaggatacccactatatcatgggatctgctctaggacctcatccattcccagagattgtccgtgattttcaaagtgtcattggcagggaagctaaacgacaatttgcagagcaaaatgacggggctctgccagatgccgtcctagcctgtgtaggaggcggatcgaacgccattggtctcttccatccttttgtagaggatacaactgttgccatgtatggggcggaagcagctggacttggggtagatacagacaagcatgcagcaaccttgaccaagggacgtccaggagtcctacacggcgccttgatggatgttttacaggatgcccatggacagattttagaagccttctcgatttcagcaggtctcgattatccagggattgggccagagcattcttatttccatgacatcaagcgggcgacctatgtgcctgtgacagaccaagaagccctagaagcttttcaattgctttcaaaagtggaaggaatcattccagccctggaatcgagccatgctatcgcctatgcggtgaaattggccaaggagatgggtcctgaaaaatccatgatcgtttgcttatcaggtcgtggggacaaagatgtggtacaagtcaaagaccgcctagaacaagagagaggggagtaagatgggaaagaccttaacagagcatttacaaaagctgaaagaccagcaacgagggatctttgttccgtatatcatggcaggagatcatgaaaaaggcttagcaggtttgcaggaaaccatccaatttttggaagagcttggtgtctcagccattgaagttggtattcctttttcggatccggtggcagatggccctgtgattgaagaggcaggactgcgaagtttaggccatgggacgacgacagagggtctggtgcaaacgatccagcgtctggagacaagtgttcctttggtcatcatgacctatttcaatcccttgttccaatatgggctcgaaaacttctttagagatttagaaggaacagctgttaaaggggtgattattccagatcttcctcatgagcatgcggatctggtagagcctctcatagcggataaagacatcgctttggttccactagtgagcttaaccacaagaatcgagcgccagaagaaattgatccaagatgcagaaggttttatctatgctgtagcggttaatggagtgacggggaaagctggtagctatcgagacgatctggaccaccacttggcccaattacacgaaatagcttcgattcctgttttaacaggttttggagtttccagcatggaggatattcaccgtttcaacaaggtctcagatggcgttattgtgggatctaaaatcgttaaggctctccaccaaggggagacagaagccatctctcattttatttctcaagcagtgaagggctaacagatctattctatttgtaattggctcgattctcctagatcaagctctttgtctactattttaaacattgccctcgtttgtctttacaaacgagggtttctcgatacaatagagatagtaataagaaaagaggagaagagaatgataagccttgaagagattgatcaagtcgtccagtcaggcccttttgaaccaagctgggactctcttagccatcaagtttgtccagactggtatcgggatgccaaatttggaatgtttatccactggggggtctacagtgtacctgccttcggttcagagtggtattcacgaaatatgtatatccaagggaatccttgctatgactaccatcgagagtattttggagaccaggctagcttgggctacaaggatctcattcctctctttacagcagatcgatttgatccggcatcttggctggatctctttcaaaaagcaggcgctcagtattttttcccagttgcggagcaccacgatggttttcagatgtatgcctctactctctcgccttataatagcttagaaatggggccaagacgagatgttttaggagaactgagggcggaagcagaaaaacgtggtctacacttctgtacatcttctcaccgggcagagcaccagtttttcttttcacatggcaaggagtttgctagtgacattccgcaagaagtcccaagagacagcctttattggccagccgagccagagccaaaggatcattttgatctgacttccaagccttatccaagcaaagaattcttggaagattggctgtcgcgaacctgtgaactggtgcgggactaccagccagagctcctttattttgactggtggatccagcatgagagtttccgtccttacttgatgcgctttttggcgtattattacaatctagcagcacaagaggatcgcaaggtggctgtttgttacaaacaggatgccctccctttcggttcaggaatcgtcgagatggagcggggaggatacggagagacgcaagcctttccgtggcaaatggataccgcgatcgcccgtaattcttggtgttatacccaggatctagcctacaagaccagtaaggaattgctacaaaatttagttgatgttgtggcaaaaaatggcaatcttctgctcaatattggacccaaggcagatggcactatccctgagcaagaccaagacattctcacagagatcggggagtggctggcggtaaacggagaagccatttatcagagccggccttggcgggtgtcatcggacggaccgaccgaggcccaggaaggttccttctcagatgggaaagcgccactctataccaaccaagatttccgctataccatgcgtgaaggcctactttatgctatccagctggaaccaagtggacggacagaagagctgaccttgccgtctctcgcctatgatctcaagcaaccgagaatccttcatgcgcgtattcggcaggtagagctccttggagaaagccagctcctttcttggagtcaagatgaccaagggctccaccttcaattaccagcttgcagccaaaaacaaccgcgtgttttgcgtctcagtttttagttttcttgaagctttctataaggaatggtttaggtttctcttgtatactgtactcatccaataagaaatgaggtacagaaaatgaaaatctcagtcaattatccaaaacgctttaagaaattgccacaacaagggtcttgttacggcgaataaacgcttctcttcatttttcataagaaactcctaaagaaggctctacccgaaagggtagagtttttatgtaccagagaccttgtgattcgtggtataataagcctatggaaaaaaagaacaaattactactcatcgacgggtcttccgtcgcttttcgtgccttttttgcactctacaatcaaattgatcgcttcaaaaatgccaatgggttgcataccaatgcggtctatggctttaacctcatgttgagccatctcttggagcgcatccaaccgacccatgtcctcgttgctttcgatgcaggaaagacgacctttcggacggagatgtatgccgactataaaggaggccgggcaaaaacaccagatgaattccgtgagcagttcccttttattcgcgagcaactagatcatttgggaatccgccattatgagctgccccagtatgaagcggatgatattattggaacgctagataagatagcagaaactagctcggtgccatttgatgtgaccattgtctctggggacaaggatttgatccagctgacagatgacaatacggtggttgaaatctctaaaaaaggggtagcggagtttgaggaattcactccagcctatctgaaagaaaagatgggactgacaccagagcaatttatcgacctcaaggccttgatgggagataagtcggataacatcccaggtgtcaccaagattggagaaaagaccgggattaaactactcctagaatacggttctctcgatggcatttatgagcatatcgatgagatgaaggcttctaagatgaaggaaaacctcatcaatgacaaggaacaggcctatctgtctaagactttggcgaccatcgataccaatgcgcccattgagattggcctagacgatatcacctatacggggccccatctagaaaatctcgccaagttttatgaggagatgggcttcaagcaactccgtcaggccttggatttcagtggagaagaggtggctcctgtagcccttgactatacagaagtcgagcaagtcgcttccgatatgctcacggaagatagtttctttcatttcgagatgtttggggacaactaccatacagaacccatcatcggtttcgcatgggggacaaaaggtcagctctacgcgagtacagatactggtcttttacaaacaccgattttcaaagaatttcttgaaaaaacacccctcaaggtctatgacttcaaacgagccaaggtcttgctcagccacttgaatattaccttgcaaaagccagtttttgacagtcgattggccaagtatctcttgtcgaccgtagaggacaatgaaatttcaaccattgcgagtctctatagccagattgcgctgccgctggacgaagtcgtttatggtaagggagccaaaaaagccattccagaaaaggcagtcctattagagcatttggcccgaaaagtcgctgttttactagacactgaagagcctatgacggagcagttacaagctcatgaccaactagatttgctctatgatatggagcaaccactagcagctgttttggccaagatggaaatcgcggggattaaggtagagcgtcagaccctacaagatatgcaggtggaaaacgaagcagtcttggagcgcctgacccaagaaatctacgagttggcaggagaagagttcaatatcaattctccaaaacaattgggagtcatcctctttgaaaaattggaactccctcttgaatatactaagaagaccaaaaccggctattccacagctgttgatgtcttggaacgcctagccccaatcgcaccgatcgtgtctaagattcttgaataccgccaaattgctaagatccaatcgacctatgtcatcggtcttcaagactggattttggaagatggaaagatccatacccgctatgtacaggatttaacgcagacaggacgcttgtccagcgtggatcccaacctgcaaaatatccctgtccgtttggagcaaggccgtcttattcgcaaggcctttgtcccagaagaggaaaacagtgtcttgctgagttcggactattcacagatcgaattgcgcgtcttggcccatatttcgggagatgagcatttgattgatgcctttaaacatggggcagatatccatacatcgactgcgatgcgggtcttcaatattgaaaaaccagaagacgtgacaccgaatgaccgtcgcaatgccaaggcagtaaacttcggtgtggtttatggaatttccgactttggactgtctaacaacctagggatcagccgaaaagaagctaaggcctacattgagacctacttcgaacgctaccctggcatcaaggactatatggagagagtggtgcgggaagcgcgtgataaaggctatgtggagactctcttcaagcgtcgtcgggagattccagatatcaattctcgcaacttcaatgttcgaggctttgcggagcggacggctatcaactcaccgatccaaggatcggcagccgatatcttgaaaattgctatgatccacttggaccaagcgctagaaagaggagcatacaagaccaagatgctccttcaggtccacgatgaaatcgttctgcaagtaccaagtgaggaactggcagcgatcaaagaactcgtcaaagaaaccatggaatccgctattgaacttgcggtaccactggaagccgatgagaatgaaggcaaaacatggtatgaagccaaataagatcgagtttgtttaaaacagaaagcggtaggagacttttcagttttctaccgcttataacgacaaacacttgcaatgcccttcgtattgttatactatttaaagaaaggaaacgcatacaaaaggagattcatatggcctattcatttcgcaatcctagtgatggcattatcaaacattacctagaaaccagtaaaatcattgctgtagttggattatctgaccgtgaagatacgaccagccatcgtgtcagcaaggagatgcaagagcggggctatcggattattcccgttaatcctcgtgcagccggtgggcaaatccttggagaaacggtatacgctagcttgcaggaaattcctttcccagtagatatcgtcgatgtttaccgtcgcagtgagtttttgccagatgtagcgcgtgactttatagaatcggatgcgaagattttctgggcacaactagagctggaaaatcaagaagcagaagaaatccttcgtggagctggacgagaagatatcgtcatgaaccgctgtatcaaacgcgaacacacccgactgatcttaggagactctctatacggtttataaatgacaagaaattaacagtagaacgatagaagaaaaccccagcaggaaactggggttttcttcttactcttatttcgtttcgtggcttggatggcctgtaaaatggcgcggtccctgtttgatctgtttgatttgatcgtaaaatgcaatttggcaattgataaaataaggcatagtataaaaaccaatgacatcgcgcgtgaagtaattcaggaagtaccatccaaacaaggttagatcgagcaccaggcgattgctacggaagcctttcatggtttcacgactttgacgaagcactccccaagctcccttgtagtcgccgtctcgtagttgttcgtagaggatcaattcgacaaggctgagactatagtactgtggcaagtaaaagaggagaccaagtaggcctagaacgacacctgctgtcatcagaggcatttgacgcatcatggcctgaaattcaggactagcagccgtcaaagtgctgggattgctgaccttgtcgtagatcgccaagaattgagtgctagcataggtgctaacgagactcccagcatagaggatgagtccccataaaaagaggatgacttgctttaagaacaaggtgatgaagacaggggtgaagcgatcctgttgaaagatatccaagacccgtgctcggtgttcgatcttgggattgatcgcatccagatagctaaaagtcgcaccaaccactaaaatggagatgatgaaggcaacaacagagggaaagagctgtagctgtatcatgtagatacttgcttgctgtaaggtcatatccgctagcaaatcaatcagattttgcccgcttaagagaaagttagcaagaatggtcaataggactggcagggcaaataggatagctaagcccggttgctggacttgcatggtgcgtgctcgaaggcgaattaatttaaggttcatagatgatactctcttcatagtagtactttttattataacataagtccgtgacagagccggtaaaatttggtacaatcgtacaggtgctcacaggaaaactgtgacaggaataagaaggctgggactgtctttcccagtacggaggtaaccatgacagattcaccgattcaatatcgattaatcaaaaaagaaaagcatacaggtgctcgtctgggagaaattatcacccctcacgggaccttcccaaccccaatgtttatgcctgtagggactcaggcaaccgttaagacccaatcgccagaagaactcaaggaaatgggctcaggcattattttggccaacacctaccatctctggcttcgtccgggggacgacttggtcgcaaaagcaggaggactgcaccagttcatgaactgggaccagccaattttgacagatagtggaggcttccaggtctattcactagcggatacccgcaatattactgaagaaggggtaacctttaaaaaccacctcaacggctcgaaaatgttcctttctccagaaaaggcaatttccatccaaaacaatctagggagcgacatcatgatgtcctttgatgaatgtcctcagttctatcagccctatgattatgtgaaaaaatcaatcgaacggaccagtcgttgggcagaacgtgggctaaaagctcaccgtcgccctcatgatcaaggtctttttgggattgtccaaggggctggctttgaagacttgcgtcgtcagtctgcgagtgatctggtcagtatggacttcccaggctattctatcggtgggttagctgttggggaaagccatgaagagatgaatgcggtgctggatttcacaactccgctcttgccagagaacaagcctcgctatctcatgggagtaggagctccagacagtttgatcgatggcgttattcgcggagtggacatgtttgactgtgtcttgccgacgcggattgcgcgaaatggtacctgtatgactagtcaaggacgcctggtggtgaaaaatgcacaatttgctgaagactttacgtcgctagatcacgagtgtgattgctacacttgtaagaattacactagggcttatcttcgccacctcctcaaggcagatgagaccttcggtattcgcttgaccagctaccacaacttgtatttcttgatcaatctcatgaaacaggtccgtcaagccatcatgaatgacaatctcttagaattccgggagcatttcgtcgaaaaatatggctataacaagtcagggcggaatttctaggatgaatcacgaaagatgatagaccgctttggtaaaaatgaaagatgaagcagatagccttgtcgacacatcacaagatcagtttcatgttgaaaagaatggaaagttctacaaaaagtagaacttttttctatataatatagcaacttttttagcacgttttcctttgagaaaacactttcattaaaaaaacgaaaaaaatctgttcaaatcccttgcattgaggctttcattgtgttaaactactatggtgctgtgaaaaacagctattagctttgatgcaagaggttgcgacacgctcggttgcattgccacgcaacgcgcgtcggttttcttgtggagctagcctattatcttaaatagacgaaaaggagaaaaagatggcaaacaaaaaaatccgcatccgtttgaaagcgtacgaacaccgtacacttgacacagcggctgcaaaaatcgtagaatcagctactcgtacaggtgcacaagttgcgggtccaatcccacttccaactgagcgtagcctctacacaattattcgtgcgactcacaaatacaaagattctcgcgaacaattcgaaatgcgtacacacaaacgtttgatcgacatcatcaacccaactcaaaaaacagttgacgctttgatgaaattggatctcccaagtggtgtaaacgtagaaatcaaactttaatctaaagcttgatcaagagcatgaaaaacgctcgttaaaaactttttgaataaaaaactatagaaaaggaactattttctcatgacaaaaggaatcttagggaaaaaagtgggaatgactcaaatcttcactgaagctggcgaattgatccctgtaacagttatcgaagcaactccaaacgttgttcttcaagttaaaactgttgaaacagatggttacaacgctatccaagttggtttcgatgacaaacgcgaagtattgagcaacaaacctgctaaaggacatgtagcaaaagctaacacggctcctaagcgcttcattcgtgaattcaaaaacgttgaaggcttggaagttggtgctgaaatcacggttgacactttcgaagctggagacattgttgatgtaactggtacttctaaaggtaaaggtttccaaggtgttatcaaacgccacggacaatcacgtggacctatggctcacgattctcgttaccaccgtcgtccaggttctatgggacctgttgcacctaaccgcgtattcaaaggtaaaaaccttgcaggacgcatgggtggcgatcgtgtaacgattcaaaaccttgaagttgtacaagttgttccagaaaagaacgttatccttatcaaaggtaacgtaccaggtgctaagaaatctcttatcactatcaagtcagcagttaaagctggtaaataataaggaaaggggaatacagtcaaaatggcaaatgtaacattattcgaccaaactggtaaacaagcgggcgaagttgttcttaacgatgcgatctttggtatcgaaccaaaccaagcagttgtatttgatgtgatcatcagccaacgtgctagccttcgtcaaggaactcacgcagttaaaaaccgttcagccgtttcaggtggcggacgcaaaccatggcgtcaaaaaggaactggacgtgctcgtcaaggttctatccgctctccacaatggcgcggtggtggaatcgtcttcgggccaactccacgtagctatgcgtacaaacttcctcaaaaagttcgtcgccttgcacttaaatctgtttactcagaaaaagttgctgaaaacaaatttgtagccgttgattctcttgaatttacagctccaaaaactgctgaatttgcaaaagttcttgcagctttgagcatcgattctaaagtccttgttattcttgaagaaggaaacgaattcgcagctctttcagctcgtaaccttccaaacgtgaaagttgcgactgctacaactgcaagtgttcttgacatcgcaaatagtgacaaacttcttgttactcaagcagctatctctaaaatcgaggaggttcttgcataatgaatttgtatgatgttatcaaaaaacctgttatcactgaaaagtcaatggctcaacttgaagcaggcaaatatgtattcgaagttgacactcgcgctcacaaacttttgatcaaacaagctgttgaagctgcgtttgaaggtgtaaaagttgcgaatgtgaacactgtaaacgtaaaacctaaagcaaaacgcgttggacgttacactggttttacttcaaaaactaaaaaagctatcatcacgcttgcagctgattctaaagcaatcgagttgtttgctactgaagctgaataatctaaggaggaaatatcgtgggaattcgtgtttataaaccaacaacaaacggtcgccgtaatatgacttctttggatttcgctgaaatcacaacaaacacacctgagaaaactttgcttgtttctcttaaaaacaaagcaggtcgtaacaacaacggtcgtatcactgttcgtcaccaaggtggtggacacaaacgtcattaccgtttgatcgatttcaaacgtaacaaagatggagttgaagcagtcgttaaaacgatcgaatacgatccaaaccgctcagctaacatcgcgcttgtacactacactgacggtgtgaaagcttacatcatcgcccctaaaggtcttgaagtaggtcaacgcattgtatcaggaccagaagcagatatcaaagtcggaaacgctcttccacttgctaacatcccagttggtactttgatccacaacatcgaattgaaacctggtaaaggtggagaattggtacgtgctgctggagcttctgctcaagtattgggttctgaaggtaaatatgtacttgttcgtcttcaatcaggcgaagttcgtatgattcttggaacttgccgtgctacagttggtgttgtcggaaacgaacaacatggacttgtaaaccttggtaaagcgggacgtaaccgctggaaaggtgttcgccctacagttcgtggttctgtaatgaacccgaatgatcacccacacggtggtggtgaaggtaaagcaccagttggacgtaaagcgccatctactccttggggtaaacctgcgcttggtcttaaaactcgtaacaagaaagcgaaatctgacaaacttatcgttcgtcgtcgcaaccaaaaataatcataagcaagtagcttacactttccgccagctcggtagcgctgcatagcagcgcaagccgctgtggtactaaattttaaaggagaaaattacaaaatgggacgtagtcttaaaaaaggacctttcgtcgatgagcatttgatgaaaaaagttgaagctcaagcaaacgacgaaaagaaaaaagtaattaaaacttggtcacgtcgttcaacgatcttcccaagtttcatcggatacactatcgcagtttatgatggacgtaaacatgtacctgtttacatccaagaagacatggtaggtcacaagcttggtgaatttgcaccaactcgtacttacaaaggtcacgcggcagacgacaagaagacacgtagaaaataaggagaacataaatggcagaaattacttcagctaaagcaatggctcgtacagtgcgtgtttcacctcgtaaatcacgtcttgttcttgataacatccgtggtaaaagcgtagccgatgccatcgctattttgacattcacaccaaacaaagctgcagggatcatccttaaagtgttgaactcagcagtagcaaacgctgaaaacaactttggtttggaaaaagctaacttggtagtatctgaagcattcgcaaacgaaggaccaactatgaaacgtttccgtccacgtgcgaaaggttcagcttcgccaatcaacaaacgtacagctcacatcacagtagctgttgcagaaaaataaggaggtaaactcgtgggtcaaaaagtacatccaattggtatgcgtgttggtatcatccgtgattgggatgccaaatggtatgctgaaaaagaatacgcggattaccttcatgaagatcttgcaatccgtaaatttattcaaaaagaattggctgacgcagcggtttcaactattgaaatcgaacgcgcagtaaacaaagttaacgtttcacttcacactgctaaaccaggtatggttatcggtaaaggtggagcaaacgttgatgcacttcgtgcagctcttaacaaattgactggtaaacaagtacacatcaacatcattgagatcaaacgtcctgacttggatgctcaccttgttggtgaaggaattgctcgtcaattggaacaacgtgttgctttccgtcgtgcacaaaaacaagcgatccaacgtgctatgcgtgctggagctaaaggaatcaaaactcaagtatcaggtcgtttgaacggtgcagatattgcccgtgcagaaggatactctgaaggaactgttccacttcacacacttcgcgctgatatcgattacgcttgggaagaagcagacactacttacggtaaacttggtgttaaagtatggatctaccgtggtgaagttcttccagctcgtaaagacgctaaaggaggtaaataaccaatgttagtacctaaacgtgtaaaacaccgtcgcgaattccgtggtaaaatgcgcggtgaagcaaaaggtggaaaagaagtagcattcggtgaatacggtcttcaagctacaactagccactggatcacaaaccgtcaaatcgaagctgctcgtatcgccatgactcgttacatgaaacgtggtggtaaagtttggattaagattttcccacacaaatcatacaccgctaaagctatcggggtacgtatgggatctggtaaaggggctcctgaaggttgggtagcaccagttaaacgtggtaaagtgatgttcgaaattgctggtgtatctgaagagatcgcacgcgaagcgcttcgtcttgctagccacaaattgccagttaaaactaaatttgtgaaacgtgaagcagaataaggagaggtcatgaaacttacagaagtaaaagaatttgttaaagaacttcgtggtctttctcaagaagaactcgcgaagcgtgaaaatgaattgaagaaagaattgtttgaacttcgtttccaagcggctgctggtcaattggaacaaactggacgtttgaaagaagtgaaaaaacaaatcgctcgtatcaaaactgttcaatcagaagctaaataatagactagggaaggagaatttcaatggaacgcaataatcgtaaagttcttgttggacgcgttgtgtctgacaaaatggacaaaacaatcacagttgtagttgaaactaaacgtaaccacccagtctatggtaaacgtatcaactattctaaaaaatacaaagctcatgatgaaaacaatgttgctaaagaaggcgatatcgttcgtatcatggaaactcgtccgctttcagctacaaaacgcttccatcttgtagaagtcgttgaagaagcggtcatcatctaatcatacctgaaaggagaaaacgtaaatgattcaaacagaaactcgtttgaaagtcgctgacaacagtggcgcacgcgaaatcttgaccatcaaagttcttggtggttcaaaacgtaaattcgcgagcatcggagatgtaatcgttgcatctgtaaaacaagctactcctggtggtgcggttaagaaaggtgacgttgtaaaagctgttatcgttcgtactaaatcaggtgctcgtcgtaaagatggttcatacatcaagttcgacgaaaatgcagcagtgatcatccgtgacgacaaaactcctcgcggaactcgtatctttggcccagttgcacgtgaattgcgtgacggtggtttcatgaagatcgtatcacttgctccagaagtactttaatcaataaataacaaacacagtcccctggcttagccagggtgcccatcgggcgtaagaataaaaggagaaagaaatgtttgtaaaaaaaggcgacaaagttcgcgttatcgctggtaaagacaaaggcgtagaagctgttgttcttactgctcttccaaaagtaaataaagttgttgtagaaggtgtaaatatcatcaagaaacaccaacgtccaaataacgaaaaccctcaaggtgctatcgttgaaaaagaagctccaatccatgcttctaacgttcaagtgttggacaaaaacggtgttgctggacgtgttggctacaaatttgtagacggcaaaaaagttcgctacaacaaaaaatcaggcgaagtgcttgactaatcacgaaggaaaggagaagtataatggctaatcgtttaaaagaaaaataccttaatgaagtagtaccatcattgactgaacagttcaactattcatctgttatggctgtgccaaaagttgataaaattgtcttgaacatgggtgttggtgatgcagtatcaaatgctaaaaaccttgaaaaagctgctgaagagcttgctttgatctcaggtcaaaaaccattgatcactaaggctaaaaaatcaatcgccggcttccgtcttcgtgaaggtgttgcgatcggtgcaaaagttacccttcgtggtgaacgtatgtacgaattcttggataaattggtaacagtttcacttccacgtgtacgtgacttccatggtgttccaacaaaatcatttgatggacgcggaaactacacacttggtgtgaaagaacaattgatcttcccagaaatcaactttgatgatgttgataaaactcgtggtttggatatcgtaatcgtaactacagcgaacacagacgaagaatcacgtgcattgcttactggcctcggtatgccgtttgcaaaataatataggaggtaaaactaatggctaaaaaatctatgattgctaagaacaaacgcccagcgaagttctctactcaagcatacactcgctgtgaacgttgtggacgtccacactcagtttaccgcaagtttaaactttgccgtgtttgcttccgtgaattggcatacaaaggtcaaatcccaggtgtcacaaaagcatcttggtaatttaagatatcaagggcgttaaaactccaagtgaaaataggaaacttgacgaagaaactttagtttctaggaaagtttatctttttcacacagagtttagcccgggttcagttgggcttgccaatttgaacacgagctacagctttggcaaaaaagaccaattttctttggagcatcgctcctgcatcaaattgcctatttttgctcttgctgttacgctctctgtatcatgtattaactagcaagtgcaacttgcaaactactagtaagaggagaaattataatggttatgactgacccaatcgcagacttccttacacgtattcgtaacgctaaccaagcaaaacacgaagtacttgaagtacctgcatcaaacatcaaaaaagggattgctgaaatccttaaacgcgaaggttttgtaaaaaacgttgaattcatcgaagatgacaaacaaggcatcatccgtgtattcttgaaatacggacaaaacggtgaaaaagttatcacaaacttgaaacgtgtatctaaaccaggtttgcgtgtttacaaaaaacgtgaagatcttccaaaagttcttaacggacttggaattgctatcctttcaacttctgaaggtttgcttactgataaagaagcacgccaaaagaacgttggtggggaagttatcgcttacgtttggtaatatttagttcccgatttcgttgtgactcttcgttattgtttcttgcctaacccaaagttatgtctgcgagacaatgccttgattcacttagaaaatgagacctaaacattaacttttaaatcaaaaagatttaaaccccgtgaaaactggcccgcaaaggcctgacaatttaacaggagaataaaaaacatgtcacgtattggtaataaagttatcgtgttgcctgctggtgttgaaatcactaacaatgacaacgttgtaactgtaaaaggacctaaaggagaacttactcgtgagttctcaaaagatattgaaatccgtgtggaaggtactgaagtaacacttcaccgtccaaacgattcaaaagaaatgaaaacaatccacggaacaactcgtgcccttttgaacaacatggttactggtgtatcagaaggattcaagaaagaacttgaaatgcgcggggttggataccgtgcacaacttcaaggatcaaaacttgttttggctgttggtaaatcacacccagacgaagttgaagctccagaaggaattacttttgaacttccaaacccaacaacaatcgttgttagcggaatttcaaaagaagtagttggtcaaacagctgcttatgtacgtagccttcgttcacctgaaccatacaaaggtaaagggatccgttatgttggtgaatacgttcgccgcaaagaaggtaaaacaggtaaataatgtagtttggttgtttttcaaccaaccttcatcttaccaactcagtgcttagcacatgattttaaaattaagaggtgaaaattgtgatttcgaaaccagataaaaacaaaatccgtcaaaaacgccaccgtcgcgttcgcggaaaactctctggaactgctgatcgcccacgtttgaacgtatttcgttctaatacaggcatctacgctcaagtaattgatgacgtagcgggtgtaacgctcgcaagcgcttcaactcttgacaaagaagtttcaaaaggaactaaaactgaacaagccgttgttgtcggcaaacttgttgctgaacgtgcagttgctaaaggtatttctgaagtggtgttcgaccgcggtggatatctatatcacggacgtgttaaagctttggctgatgcagctcgtgaaaacggattgaaattctaataggaggacactagaaaatggcatttaaagataatgcagttgaacttgaagaacgcgtagttgccatcaaccgtgttacaaaagttgttaaaggtggacgtcgtcttcgttttgcagctcttgtagttgttggtgaccgtaatggccgtgttggatttggtactggtaaagctcaagaagttccagaagcaatccgtaaggctgttgaagatgctaagaaaaacttgatcgaagttcctatggttggaacaacaattccacatgaagtaacatcagtatttggtggagctcgtgtattgttgaaaccagctatcgaaggggctggggttgctgcaggtggagcagttcgtgccgttgtcgaattggcaggtattgcagatgttacatctaaatcacttggatcaaacactccaatcaacatcgttcgtgcaactgttaacggtttggcacaattgaaacgcgctgatgaagttgctgcccttcgtggtatttcagtttctgacttggcttaagaaaggagattcaaatggctcaaattaaaattactttgactaagtctccaatcggacgcatcccgtcacaacgtaaaactgttgtagcacttggacttggcaaattgaacagctctgttattaaagaagataacccagcagtacgtggtatgatcactgctgtatctcacttagtaacagttgaagaagtaaaataatctatttgaaatagaaacaaagttttcaggggtatgagaggttctcatcccctaaaactaaatataagtataggcgagtttgtagttaggacaccttttcctgattacatgcgttagcaatttacaaaagaggagaaaattaataatgaaacttcatgaattacaacctgctacaggttcacgtaaagtccgcaaccgtgttggtcgtggtacttcatctggtaatggtaaaacttctggccgtggtcaaaaaggtcaaaaagctcgtagcggtggcggtgtacgtcttggttttgaaggtggacaaactccattgttccgtcgtcttccaaaacgtggatttacaaacatcaacgctaaagaatatgctattgtgaaccttgatcaattgaacgcctttgaagatggtgctgaagtaactccagtagtacttgtagaatcaggaattgtaaaagctgaaaaatcaggtatcaaaattcttggtaacggagaattgactaagaagttgactgttaaagcagctaaattctctaaatcagctgaagaagctatcactgctaaaggtggttcagttgaagtcatctaagtgaggtgacctatgttttttaaattattaaaagatgcatttaaggtgaaacaagtacggtcgaagattttatttacgatcttcatcattcttgttttccgcattgggaccacgattacagtgcctggtgtaaatgcgaaaattctgaacaaccttcaagatgtgtccttcttgaacatgctcagtttggtttctgggaatgccatgaggaacttctcagttttcgcattaggggttagcccatacatcacagcttcgatcgtcgtgcaacttttgcaaatggatctgttacctaagtttgttgaatggggcaaacaaggggaagttggtcgaagaaagctcaaccaagcaacacgctatatttctttggttctagcctttgttcaatccatcgggattacagctaccttccacaccttgtctcaggcgaaattagtcgcaactccaaataccaagacctatctattaatcggtgcgattctgacgaccggttccatgattgtgacttggcttggagaacaaatcacagataaagggtacggtaatggtgtttcaatgattatctttgcagggattgtgtcatcaattcctgagatgattaaagaaatctatgaaaatgcatttgtgaacgttcgttctggtcaaatgaccaattccctcatttttgttggggtattaatccttgccgtcttggttattgtttactttacaacctttgtagagcaagcacaatacaagattccaatccaatatacaaagattgcacaaggagctccatcaagttcttaccttcctttgaaagtaaacccagcaggagttattcccgtcatcttcgctagttcgattacagcagcgcctgctgcaattttccaagtgattagcgctatgggttacaatgcaggatgggtgaaaacagctcaggccatgttggctacaaatacaccaactggtgtggcaatgtatgccttattgatcattctcttcaccttcttctacacgtttgttcagatcaatcctgaaaaaacggcagaaaaccttcaaaagagtggtgcctatatcccaggcgtccgccctggtaaggggacagaagagtttatgtctcgtttgctacgtcgtttagcaagcgtcggatcagtattccttggctttattaccatcattccaatcctggctcgagatttatttggtttgacagatgcagtggctcttggaggaactagtttgttaatcattatttcaacaggtattgagggaatgaaacaattagaaggctacttattaaaacgtaagtatgtcggatttatggacacaacaacagaatagaataaggttgactttgtcagccttctattttgtttttaaatggaaataggaattcgctcctgcttccatttaaaaacaaaataaggagaattcatcatgaatcttttaattatggggttgcctggagcaggtaaaggaactcaagcagctaaaatcgttgaagagtttcacgtagcgcatatctccactggagatatgttccgcgcagcgatggctaaccaaactgaaatgggtgtgcttgcaaaatcatacattgataaaggtgagttggtaccagatgaagtaaccaatggaattgtaaaagaacgccttgctcaagatgatattaaagaaacaggtttcttgttagacggatatccacgtaccattgagcaagctcatgctttagataaaacattggctgaacttggtattgagcttgaaggtgttatcaacatcgaagtaaatccagacagtcttttagagcgtttgagcggacgtatcattcatcgtcaaactggagaaactttccataaagtattcaatccaccagttgattacaaagaggaagattactaccaacgtgaagatgataaacctgagacagtaaaacgtcgtttggatgttaatattgcccaaggtgaaccaatcattgaattttatcgttcaaaaggactcgtacatgacatccaagggaaccaagatatcaatgatgtattttcagacattgaaaaagtcttgtcaaatttgaaataaaagcgtttttcatgcttgcaatattggacaactagtgttacaattagttagtctgacttataattgttacctctgtgctcagaggaatgaatcgaaatttatggaggtacttttgcgtggcaaaagacgatgtgattgaagtagaaggcaaagtagttgatactatgccaaatgctatgtttacggttgaacttgaaaatggacatcagattttagcaacagtttctggtaaaattcgtaaaaactatattcgtattttagcgggagatcgtgttacagtggagatgagtccgtacgatttgacacgtggacgtatcacataccgctttaaataatcgaaaaacttggagggataaaaatgaaagtaagaccatcggtcaaaccaatttgcgaatactgtaaagtaattcgtcgtaatggtcgtgttatggtaatttgcccagcaaatccaaaacacaaacaacgtcaaggataagatagaaaggagaaaacatggctcgtattgctggagttgacattccaaatgacaaacgtgtagtaatttcattgacttatgtgtacggtatcggacttccaacatctaagaaaatccttgctgctgcaggcgtttctgaagatattcgtgttcgcgatcttacaccagatcaagaagatgctatccgtcgtgaagttgacgcaatcaaagttgaaggtgaccttcgtcgtgaagtaaacttgaacatcaaacgcttgatggaaatcggttcataccgtggtatccgtcaccgtcgtggacttccagttcgtggacaaaacactaaaaacaatgctcgcactcgtaaaggtaaagctgttgcgattgcaggtaagaaaaaataaaataaaataaggaggtaaaaatcttggctaaaccaacacgtaaacgtcgtgtgaaaaagaatatcgaatctggtattgctcatattcacgctacatttaacaacacaattgttatgattactgatgtgcatggtaacgcaatcgcttggtcatctgcaggtgcacttggatttaaaggttctcgtaaatctacaccatttgctgctcaaatggcatcagaagctgctgcaaaagctgctcaagaacacggacttaaatctgttgaagtaactgttaaaggtcctggttcaggtcgtgagtctgctattcgtgcacttgctgctgctggtcttgaagtaactgcaatccgcgatgtaactcctgtaccacacaatggtgctcgtcctccaaaacgtcgccgtgtataatcatcaacaattacacagcttttcgtttaagagggagtatagcaaatgattgagtttgaaaaaccaaatataacaaaaattgatgaaaacaaagattatggcgtgtttgtcgtagaaccacttgaacgtggctatggtacaacacttggaaactcacttcgtcgtgtacttctggcttcacttccaggtgcagctgtcacttcaatcaacattgaaggtgtactccacgaatttgataccgttccaggagtccgtgaagacgttatgcaaattattcttaacgttaaaggaatcgccgttaaatcttacgtccaagacgaaaagattattgaacttgatgtagaaggacctgcagaagtaactgctggagatattcttactgatagtgacatcgaaattgtaaaccctgatcattatctatttacaatcggagaaggagcatctttgaaagcaacgcttactgtaaacagtggacgtggctatgttccagctgatcaaaacaaaaaagatgatgcaccagtgggaacacttgctgtagattcaatctatacgccagtgactaaagtcaattaccaagttgaaccagcacgcgttggtagcaacgatggctttgacaagctaacccttgaaattttgacaaatgggacaatcattccagaagatgccttaggtttgtctgctcgtattttgacagaacacctaaatctattcacaaacttaactgaaattgctattgcaacagatgttatgaaggaagtggatacaacttctgatgatcgcattttagaacgtacgatcgaagaattagatctttcagttcgttcatataactgtttgaaacgtgctggcattaatactgtttacgatttgactgaaaaatcagaagcagaaatgatgaaagttcgtaacttgggacgtaagagtcttgaagaagttaaaatcaaacttgccgacttaggccttgggttaaaaaacgataaatagaggaggaatacatggcttaccgtaaactaggacgcactagctcacaacgtaaagcgatgcttcgcgatttgactacagatcttatcatcaatgaagcaattgtaacaactgaagcacgtgcgaaagaaatccgtaaatcagttgaaaaaatgattactttgggtaaacgtggtgatttgcatgcacgtcgtcaagctgctgcattcgtacgtaacgaagttgcatcacaaaactttgatgaagaaacaggtaaatactcagaaacaactgcacttcaaaaattgttctctgaattagcacctcgttatgctgagcgcaatggtggatatactcgtatccttaaaactgaaccacgtcgtggtgatgctgcgccaatggctatcatcgaattggtataatatcatcaattttgttgagtgttatgatgatggaatacactgttattcttagtctagctctggtctaccgctggggattttccccagcgggaacactcatcatattgaatgaatggtagacgcttgtttacgaaattgctttaatttaaaacaatttcgtaagcaggcgttttgtcttgcttttcatgagtagtcgagaatagcaaaaaatgatataatggaaacccatatctccaatagaagaaaaaggattcaatgacaaaacaacaagcaattaaattactaaaagagaagtaccttagtaatatgaaaaaggattcggaactctttgtcggagttgaattagagtttccgattgtagaaacaaatggaaacaaaacaaatatagaggtgacgaaaaatctttttcgaaccttagccaacttatcagattttgaaattgaaaaaatagatgacgatcaaaatcccattcaattggttcactgctcttctaaagatcgtattctattcgagttgagttacaatacaattgaatttgcatttgagagagctcattctataaatgaggtagccaaacgttttgaggcctatttaaagatcattcaaccgattttgcaagaaaataatcacgaaatccaagggcgcggaatccatcctttgtggaaagaaaatgataatagcccagtgaaaatcgaacgatacaagatgttaatggctttccttgcaatgaatggtacagggatgaaaacacactcctatccttcgtacggagcatttatatgcggaaaccaggttcaattggatgtaaggcgcgataactatcttcgcatcattaatgcatttaataaaattgaagcagtaaaagcatatttgttttctaactcagaattttcagcagaggtttgggatacaaaaattgccagagatattttctgggaagaatccttacatggttattataaggaaaatgtagggatttatcctaaggactaccaaagcgaagaagagttttttaataatctcgctagaacagctatttttacggcaattagagagggcaaatcatattattttaaaccaattcgagtggaaaactatctagatcaaaaagaaattacggcctatacggctgatggaaatgagaagatcattaaccctgtaaaagaagatctaaaacaacatcgaagttaccaatttcaagatttaactgctcgtgggactgtggaatttagaagcgtttgtacacaaccattagaaaccacctttgccccgatagcctttgagttgggattgtttgtagaattagaaaaactggaaaactatttagaagaatgttcattttttaaaaatgaagaacaggactatcgaaaacttagaaagaaatattcaaagaaaaatctaagtgaaaaggaaaaagaagcgatacaatccttttcaaaagatcttctggacatagctaaagcagaattaattaaaagaggttatggagaagaaaaatttctcatcattaacaaagaactagactaatagaaaagcctgtaatacaggcttttctttgtttatttcaaaaaaactttcaaaaaaataaaaaatttttaaaaaaagtattgacagtaaggtaaggtcatgatatactaatatagttgtcgcgcgagagcgacaaagacctttgaaaactgaacaagacgaaccaatgtgcagggcgctataactaaggttatagtaactgaacaataaaaaaacaataaatctgtcagtgacagaatgagtttaagacaaacaattattttaatgagagtttgatcctggctcaggatgaacgctggcggcgtgcctaatacatgcaagtagaacgctgaagcttggtgcttgcaccgagcggatgagttgcgaacgggtgagtaacgcgtaggtaacctgcctcttagcgggggataactattggaaacgatagctaataccgcataaaagtcgacatcgcatgatgttgacttgaaaggtgcaattgcatcactaagagatggacctgcgttgtattagctagttggtgaggtaacggctcaccaaggcgacgatacatagccgacctgagagggtgatcggccacactgggactgagacacggcccagactcctacgggaggcagcagtagggaatcttcggcaatgggggcaaccctgaccgagcaacgccgcgtgagtgaagaaggttttcggatcgtaaagctctgttgtaagagaagaacgagtgtgagagtggaaagttcacactgtgacggtaacttaccagaaagggacggctaactacgtgccagcagccgcggtaatacgtaggtcccgagcgttatccggatttattgggcgtaaagcgagcgcaggcggttagataagtctgaagttaaaggctgtggcttaaccatagtacgctttggaaactgtttaacttgagtgcagaaggggagagtggaattccatgtgtagcggtgaaatgcgtagatatatggaggaacaccggtggcgaaagcggctctctggtctgtaactgacgctgaggctcgaaagcgtggggagcaaacaggattagataccctggtagtccacgccgtaaacgatgagtgctaggtgttgggtcctttccgggactcagtgccgcagctaacgcattaagcactccgcctggggagtacgaccgcaaggttgaaactcaaaggaattgacgggggcccgcacaagcggtggagcatgtggtttaattcgaagcaacgcgaagaaccttaccaggtcttgacatccctctgaccgctctagagatagagttttccttcgggacagaggtgacaggtggtgcatggttgtcgtcagctcgtgtcgtgagatgttgggttaagtcccgcaacgagcgcaacccctattgttagttgccatcattgagttgggcactctagcgagactgccggtaataaaccggaggaaggtggggatgacgtcaaatcatcatgccccttatgacctgggctacacacgtgctacaatggctggtacaacgagtcgcgagtcggtgacggcaagctaatctcttaaagccagtctcagttcggattgtaggctgcaactcgcctacatgaagtcggaatcgctagtaatcgcggatcagcacgccgcggtgaatacgttcccgggccttgtacacaccgcccgtcacaccacgagagtttgtaacacccgaagtcggtgaggtaaccgtaaggagccagccgcctaaggtgggatagatgattggggtgaagtcgtaacaaggtagccgtatcggaaggtgcggctggatcacctcctttctaaggaaatggaaacctgtacgttggtcttgtttagttttgagaggtcttgtggggccttagctcagctgggagagcgcctgctttgcacgcaggaggtcagcggttcgatcccgctaggctccattaacactgtaagggtgttaagattgaacattgaaaattgaatatctatatcaaatagtaacaagaaaataaaccgaaacgctgtaaatatttaaagagtttaggtcgcaagaccaaaataaggttaagttaataagggcgcacggtggatgccttggcactagaagccgaagaaggacgtgacaaacgacgaaatgctttggggagctgtaagtaagcgacgatccagagatgtccgaatgggggaacccactagctaatggctagtactcctatctgttaaggataggtagaggaagacgcagtgaactgaaacatctaagtagctgcaggaagagaaagcaaaagcgattgcctgagtagcggcgagcgaaacggcaggagggcaaaccgaagagtttactcttcggggttgtaggactgcaatgtggacttaaagaatatagaagaatgacatgggaaggtcagccaaagagagtaagagcctcgtattcgaaatagtctttatacctagcagtatcctgagtacggcgggacacgagaaatcccgtcggaatctgggaggaccatctcccaaccctaaatactctctagtgaccgatagtgaaccagtaccgtgagggaaaggtgaaaagcaccccgggaggggagtgaaatagaacctgaaaccgtgtgcctacaacaagttcgagcccgttaatgggtgagagcgtgccttttgtagaatgaaccggcgagttacgatatgatgcgaggttaagttgaagagacggagccgtagggaaaccgagtctgaatagggcgtcttagtattatgtcgtagacccgaaaccatgtgacctacccatgagcaggttgaaggtgaggtaaaactcactggaggaccgaaccagggcacgttgaaaagtgcttggatgacttgtgggtagcggagaaattccaaacgaacttggagatagctggttctctccgaaatagctttagggctagcgtcgacattaagattcttggaggtagagcactgtttgggtgaggggtccatcccggattaccaatctcagataaactccgaatgccaatgaattatggtcggcagtcagactgcgagtgctaagatccgtagtcgaaagggaaacagcccagaccaccagctaaggtcccaaaataattgttaagtggaaaaggatgtggggttgcacagacaactaggatgttagcttagaagcagctattcattcaaagagtgcgtaatagctcactagtcgagtgaccctgcgccgaaaatgtaccggggctaaaacaatttaccgaagctgtggatacctttataggtatggtaggagagcgttctatgtgtggagaaggtgtaccgtgaggagcgctggaacgcatagaagtgagaatgccggtatgagtagcgaaagacaggtgagaatcctgtccaccgtaagactaaggtttccaggggaaggctcgtccgccctgggttagtcgggacctaaggagagaccgaaaggtgtatccgatggacaacaggttgatattcctgtactagagtatgtagtgaaggagggacgcagtaggctaactaaagcgtgcgactggaagtgcacgtctaagcagtgaggtgtgaattgagttaaatgcttaattctataacattgagctgtgatggggagcgaagtttagtagcgaagttagtgacgtcacactgccaagaaaagcttctagcgttaatcatactctacccgtaccgcaaaccgacacaggtagtcgaggcgagtagcctcaggtgagcgagagaactctcgttaaggaactcggcaaaatgaccccgtaacttcgggagaaggggtgctggctttcagtcagccgcagtgaataggcccaagcaactgtttatcaaaaacacagctctctgctaaatcgtaagatgatgtatagggggtgacgcctgcccggtgctggaaggttaagaggagtgcttagcgtaagcgaaggtatgaattgaagccccagtaaacggcggccgtaactataacggtcctaaggtagcgaaattccttgtcgggtaagttccgacccgcacgaaaggcgtaatgatttgggcactgtctcaacgagagactcggtgaaattttagtacctgtgaagatgcaggttacccgcgacaggacggaaagaccccatggagctttactgcagtttgatattgagtgtctgtgccacatgtacaggataggtaggagccattgagatcgggacgccagtttcgatggaggcgttgttgggatactacccttgtgttatggccactctaacccggtaggttcatcatctacggagacagtgtctgacgggcagtttgactggggcggtcgcctcctaaaaggtaacggaggcgcccaaaggttccctcagaatggttggaaatcattcgcagagtgtaaaggtataagggagcttgactgcgagagctacaactcgagcagggacgaaagtcgggcttagtgatccggtggttccgtatggaagggccatcgctcaacggataaaagctaccctggggataacaggcttatctcccccaagagttcacatcgacggggaggtttggcacctcgatgtcggctcgtcgcatcctggggctgtagtcggtcccaagggttgggctgttcgcccattaaagcggcacgcgagctgggttcagaacgtcgtgagacagttcggtccctatccgtcgcgggcgtaggaaatttgagaggatctgctcctagtacgagaggaccagagtggacttaccgctggtgtaccagttgtctcgccagaggcatcgctgggtagctatgtagggaagggataaacgctgaaagcatctaagtgtgaaacccacctcaagatgagatttcccatgattttatatcagtaagagccctgagagaagatcaggtagataggttaggagtggaagttgtgtgagcaatggagcggactaatactaatagctcgaggacttatccaaagagtcagaagatattgacaacgtgagtttaacttgttagaatatagatgttcaattttgaatgtttaatcattcagagttaagtgacgatagcctaggagatacacctgtacccatgccgaacacagcagttaagccctagaacgccggaagtagttgggggttgccccctgtgagataaggtagtcgcttagcaagagattgagcctagtagatactaggctcatttgggagtttagctcagctgggagagcatctgccttacaagcagagggtcagcggttcgatcccgttaactcccatttaagcgggtgtagtttagtggtaaaactacagccttccaagctgttgtcgcgagttcgattctcgtcacccgctttgaacttttgttcagttttaccaagtttttttaaacttgggcgcgtagctcaggtggttagagcgcacgcctgataagcgtgaggtcggtggttcgagtccactcgtgcccattaatagtatggtccgttggtcaaggggttaagacaccgccttttcacggcggtaacacgggttcgaatcccgtacggactatatatctggaggattacccaagtccggctgaagggaacggtcttgaaaaccgtcaggcgtgtaaaagcgtgcgtgggttcgaatcccacatcctccttaatattaacgcgggatggagcagctcggtagctcgtcgggctcataacccgaaggtcgtaggttcaaatcctgctcccgcaatttggctcggtagctcagttggtagagcaatggattgaagctccatgtgtcggcggttcgattccgtctcgcgccatcaattcaataatcaggaagggtagcgaagaggctaaacgcggcggactgtaaatccgctccttcgggttcgggggttcgaatccctccccttccatcctttacgggcatagtttaaaggtagaactaaggtctccaaaaccttcagtgtgggttcaattcctactgcccgtgttaataattatggcgggtgtggtgaagtggttaacacaccagattgtggctctggcatgcgtgggttcgatccccatcactcgcctatttattaatattattggggtatagccaagcggtaaggcaagggactttgactccctcatgcgttggttcgaatccagctaccccagttaaatttatgccggcgtggcggaattggcagacgcgctggactcaaaatccagtgtccgcaaggacgtgccggttcgaccccggccgccggtatagattataaaaggagttttactcctttttttgtttattttttttcttttttgtgatataattaaccggtaaagtttctgttagtgaattagaaggagtttattttgtctgaagttgcaaataaaatcgatcgttttttaaattctattttattattatctgagaatcaacatgagattttagttggttcttgtacaagtggtgtttcattaaccaacactcaggaacatattttgatgctggttgctgatgaatctctaaccaattctgtcttagctaagaaattgaatgtcagtcaggcggctatcacaaaggccgtgaagcccttattaagtcaggggatgttagagacttatcgtgatgagaatgatgctcgagttctctattatcgcttaactgagattggtaagccaattgcattagagcatcagcaccaccatcagcatactcttcacacttatgaggatgttttgtcgaagtttactaagaatgagcaaggggttatttcgaggtttttagatttattggaagaggagttatagtttgaggtatattacggtttcaaatttatcgttttattatgatcgggaaccggttttagaagggatcaattactacttagatagtggggagtttgtgaccttgaccggggaaaatggtgctgctaagtcaaccttgattaaggctagccttgggattttacagcccaaggtcgggacagttgagatttcaaagacaaatgtaaagggaaagaagttaaggattgcttatcttccacaacagattgctagttttaatgcagggtttccaagtacggtctatgaatttgtgaaatcaggtcggtaccctcgtaaaggatggtttcgaaagttgaatgagcacgatgaaaaacatattctgaagagtttagaatctgttgggatgctggagttcaaggatcgggcgattggttctttgtctggtggtcagaaacagcgggctgtcattgctaggatgtttgcttcagatccggatatctttgttttagatgaacctacgacagggatggatgcgacgacaaagagtgatttttatgagttgatgcatcacagtgcgcatcaccatcaaaaatctgttttgatgattacgcatgatcctgaagaggttaaccaatttgcggatcggaatattcatttggttcgtgaccaaagctctccttggagatgttttaatgtccatgatactgaaggggagggtgaccatgcttgatttattccagtatgattttatgcaacgggccttgttggctatggttgccatgagtcttttttctcctgtattagggattttcttgattttaagacggcagagtcttatgagtgatacgctaagtcacgtctctcttgcgggtgtcgcttttgggcttttccttgggatctctccaacgctctcgaccatgatcattgtcattattgctgcggtttttcttgagtatttgcggaccttatttaaggactttatggagatcgggacggcaattttaatgtccacaggtcttgccctagctttggtactgatgcgtggtggtgggaagagctcgatgagcttggatcagtatttgtttggttctaccctaaccattacggatgaacaggtgatcgccttgtttgtgattgctttcgttgtattagtgctgacggccttattcttgcggcctatgtatattttgacctttgatgaagatacggcctttgtggatgggcttccggtccggaccatgtccatcttatttaatgtggtaacgggggttgctatcgccttgatgattcctgcagcaggatcgttattggtttcaaccatcatggtcttaccggctagtattgcgctgaaattagggaagaacttccgtggggtcatgctgcttgcggtcattattggctttatcgggatgtttagtgggttgattttgtcttatattgcagatacaccagcaagtgccagcatcacgcttttatttgtggccttgttcttgcttgtgaatcttggatcacgtttgaggaggtaaatatgaaattaaaaaaaataggtttaatgttgttggtggcttttgcccttatcttgactgcttgtggcaaaagtcagagtcaaaatggaaaattaaaagtgatgaccactttttatcctgtttatgattttacaaaaaatattgtcggagatgaaggaacggtagacctgctcattggagcgggatcagagccccatgaatatgaattgtctgctaaggggcgggctatgattcaagattcggatgttttcgtctatgagaatgaaaacatggaaacgtgggttccaaatcttttgaaatcaatgaaggataagaaaaccaaagtgatcgatgccactaagggcatggtcttgcttcctggattggaagaggatcatgaccacgaagggggcgaagaacacgatcatgaatatgatcctcacctttggctgtctccacatcgtgccatgaagatggtagagtcgattcgcgatcagttggtcgcagcttatccagataagaaaaagacgtttgagaaaaatgcgcaagcttatttgaagaagttacaggctttggatcaagcttatcaggatggcttgaaagatgctaagcaaaagaattttgtgacccaacacgcggctttccgttacttggccttggattatggcttaaaccaggtggccatttcagggatttcacctgatagcgagccttctgctgcacgattgcgtgaattgacagagtatatcaagaaaaatgagatcaaggtcatttactttgaggaaaatgcttctaagtccttggcgaaaaccttgtcttctgaagctggtgttgagttggctgtcttaaatcctttggaaagtctgacggatcaagaaatgaaagatggcgaagactacgtgtctgttatgaaggagaatctgaaggcgctagagaaaacaacgtcacaagctggtaaggatattcaaccggaacatgaggaagatgctaagacagttcaaaagggctatttcgaggatagtcaagtgaaggaccgtagcttagcaaattacgcgggtgattggaaatcggtttatccatacttgcaagatggaactttggatcaggtctttgattataaggcaaaactaaacccaaccatgactgctgctgagtataaggaatattataccaagggttaccaaacagatattgatcggattaagattgataaggattcaatggaattttatcaaaaaggatcttctaagaaatatacctataaatacgtaggtaagcacattttgacttataagaaggggaatcgtggtgttcgttatctctttgaagccaaggagagcgatgcgggagacttcaaatatgttcaatttagtgaccatgaaatcactccggtaaaggcagctcacttccacattttccatggaggaaagagtcaagaagcgctttatgatgagttggaaaattggccaacttattatccttccaacttatctggtctagaagtggcacaggaaatgctggctcattaagagtagtatcaaaagagagactaggactgattatcccggtctctttttgattaaaaatggggagtgaagcttgtcaaatgcttgaaaatacgttacaatgagagggctttaaattaaaaaatgtatggggaattttaaatgaaaaaagttggtgcaattcttgtgagtcttctcagtgtggtcctgttggtagcttgttcgcaacagggagcaagcaaaaaatcaaccccttcctctagtcaaacgacgacctcttctgaagtcaaaaagacggatgcttctagttcggaagtgaaggagaaagaaaaaaaagaagagaaaaaagaagtgaagaaaatggatcttgaggctattgccaacggagattacagcagtattgctggtgtctggcaagatgataaaggaaacaagctggtctttaacgacaaagggttggtctcgcaagagttagagggctatggagcttctttgacggattacggaaccgcctcagaaggcatttatggtggtcgtgatggaggcttcttgttggagtatattcctgcgggagtaaccattggtgatcaggttgatgatcaaggacaagtcgtctttaaggacacatcagatgcctctaaaaaccgcttgtggtctggtgttggtatcgctagttttggggaacaaggctcgatctactatcatgtaggagatgaataatggaaaagaggctgggacaaaagtcctagcctctcaattatttttggattgtcgagcaagacgcagtggttgagtgggctctactacgctgatttcatcagcttttacagccctactcaactgtgcggaggtgggacgacgaaatcgaattctaacgaattaccgatttctgtcccactctctttcttatgcgtgtggtgggagccaagaaagctcaaattggagcaattgggcttcaaggagatcttgatgggaaacttcttgtttctctttgccgtctaatagggctttttggatgaaataggcgcctgcagtgtgtgagttggtgcaaatcttgagctcttgcttgggaagatggagaaggacttctttaaagagagggaggcccagatcatagattagttttcctgggcaggttggatagagtccaagggatgaccagatgtaccaagcagatagactaccattgtcctcatcacctggataggcttggaaatttggatggaaagcttgggaacggatctggtggatcaggagattggtgtattcgggatgaaggctgtgacggaagaggtagggaaggtgaaagctgggttgattggagatggcgatctgcccaaatgcggcttgggccatttcactcatttcgtggatttcatagccatatcctcttacatcaaattgaggtctttgattggccagatccagcaatcgttgggtgaaggcttttttaccgcccatcagctctatcaggccggagaggtcgtgtaaggctccaaaagtagcctgagttgcagagcattctgcataatctcctccccagctggtaggagagaagggttctttaaagtttccattggtggatcgtgctctcataaagcctgtttgggcatcgtacaatgttcggtaggagaggctggaagcagcataccgagcggctgtttcggtatgccccaattgcttggcaacggtagcaatgcaaaaatcactataggcataatctaggctatggctcacactttcgtgaaaatcatcgggtaggtagccgagggccttgtagctttcattgccatggcgaccaaaatgttgagtagggtctgttttttgagccgtctggagcatagctgtcagcatgtttttatgtaggtctggtgcgatcccttttgtgacagcatccgcaaagactccatcgatgagggtacctggcatcattcctcgttcatctggggccaaccattttggtagaaaaccagtatccttgtaagtatttaaaaatccttcgagaaagtgacggtaataatcggggtagacaagactaaagagcggaaaagatgttcggaagagatcccagaatccgatattggtataagcttttcctggtttgatttcattatgagtgacatccaggtgccagtcatttcccttactatctgtttcataaaaggtttgagggaaaaggaggagtcggtaaaggcaatggtcgaaaaaggcttgataacgccctccggcatcttttacttcaattcgctttagtagctgattccattgatcggctgcttcttttttagctccctctagagaaaggttgggaagatggctgtgagccatgtcttgagacagataagagcttcctaattggacggtcacttccttgctagaaaaggtcagaaaaagatcttgattgatgtgagtgacattctcgatcggctggctaaattgccactgaagataaaaagagtaggaagtatctgcggtatgagcttgatccagaatgtggaagtggcaggtttggtctgtaagggtcaagtccactagttcctttgctgcatgaaagcagagtgttagcttttctggtgctcgaaagtgcatgacagccccgtagcggcttggaaccagctcgctttgaatctgataacgttccgaaaaaatccgaaggtagtggggctggaaaagagcttctttcagcgaataactgctttggcgacggaagaggtcggaacttgtaacttctcctgtgataggcgtgatgaggcaccaagcgtagtctccgatccaaggactaggctggtgagtgagacgaaatccctgaaaaatagggagattggggttgaaaaaccaagccccttgttcgtgtgtcgtctgaggaaggaagtagttcatcccaaaagggactcctgtataagggagggtgtttccgtgggaatagtgaggatgattatcgcttccccaacgggtatcgatggtctggcaatgtgtgcgcatcttgtctcctttttcttcatcaaccttaaatgatctgtatttttcttggaacacgcggtggtatttccttcattgtatcaaagtgttgtcaaatatgatagcgtttttatcaaatggaaaattttgtagaaaaagggctatagtttgcgtatgtatttcccttttgaaatcttttatactgaataggaaagaatcgatacgtgtgaggaaaataaatgacctattcaaaagaaattgtgcgagaatggttggatcaagtggctgagcgagctaaggagtaccctgagtgggtggatgtctttgaacgttgttatacagacactttggacaatacagttgaaattttagaagatggttcaacctttgtgttaacaggggacatcccagctatgtggttgcgtgactcgacggctcaattgagaccctatcttcatgtggctaaacgagatccccaattgcgtcagaccattgctggtttggtcaaacgccagatgaccttgatcctcaaggatccctatgccaactcttttaatattgaggagaactggaaaggccatcacgagactgatcacaccgatttgaatggctggatttgggaacgtaagtatgaagtggactcgctttgctatcccttgcaattggcttacctcctgtggaaggaaactggtgagactagccaatttgatgagacttttgttacagcgaccaaggaaatccttcatctctgggcagtggaacaagaccacaagaactccccttatcgctttgttcgggatacagatcgtaaggaagacacgctggtaaatgacggatttggtcctgactttgctgtgacagggatgacctggtcagcctttcgtccaagtgatgactgctgtcagtatagttacttgattccgtccaatatgtttgcagtggttgtcttgggttatgtgcaagaaatcttcgcaacattgaatctagccgatagcgagagcatcattgcagatgccaaacgcctgcaggcggagattcaagaagggatcgaaaactacgcctacaccactaacagcaagggcgagaaaatctatgcctttgaggtagacggtttgggaaatgctagtatcatggacgaccctaacgtaccaagcttgttggcggctccctatctgggctactgcgccattgacgatgaagtctaccaagctactcgtcggacgattttgagccctgaaaatccctacttctatgaagggaagtacgcaagtgggcttggaagttctcataccttctaccgctatatctggccgattgctctatcgattcaagggttgacaacgacagataaagctgagaaaaaagatctgttagaccagttggttgcctgcgatggaggcacaggcgtcatgcacgaaagtttccatgtagatgatccaaccaaatactcgcgtgaatggttctcgtgggccaacatgatgttctgcgagttggtcttggattacttggatattcgctaatactcttcgaaaatcaaattcaaaccacgttagcttcgccttgccgtatatatgttactgacttcgtcagttctatctacaacctcaaagcagtgctttgagcaacctgcggctagcttcctagttcgctctttgattttcattgagtataaggagcacgctttagcttcactgattcttgttagaatcacaagtttatatttaaaacattaaaaatttaagttagaatgaggttttactcatggaaaatgttgttgtacatatcatctctcacagccactgggatcgtgagtggtatctaccttttgaaagccaccggatgcaattggtggaactgtttgacaatctgtttgatctttttgaaaatgatccggagttcaaaagtttccacttggatggccaaaccattgttctcgatgactatttggaaattcgccctgaaaaccgcgacaaggtgcaacgttatatcgacgagggcaagctcaagattggtcccttctacattttgcaggatgattacctgatctccagcgaagccaacgtccgcaataccttgattggccaagctgaatgcgctaaatggggcaaatccactcagattggttacttcccagatacctttggaaatatggggcaagcacctcaaattcttcaaaaatcagggattcacgtagcagcctttgggcgtggggtcaaaccaatcggatttgacaaccaggtcctcgaagatgagcaattcacctctcaattttctgaaatgtactggcaaggggcggatggtagccgtgtgctgggtattctctttgccaactggtacagtaatgggaacgaaattccagtggataaagacgaagctttggctttctggaaacaaaaattggcagatgttcgcgactatgcctcaaccaaccaatggttaatgatgaacggctgcgaccaccaaccggttcaacgaaacttgagtgaagctattcgcgtggccaacgaactgttccctgacgtgacctttattcatagctcctttgatgaatatgtgcaagcagtggaaagtgcacttcccgaacaattatcaacggttacgggagaattgaccagtcaggaaaccgatggttggtacactcttgctaatacctcttcttcacgtatttacctcaaacaagccttccaagaaaacagcaacttgctcgagcaagtggtggaacctttgaccatcattactggtgggcacaaccataaggatcaattgacctatgcttggaagacactcttacaaaatgcgccacacgatagtatttgtggatgtagcgtagatgatgttcaccgtgaaatggaagttcgttttgccaaggtcaaccaagtcggaaactttgtcaagaccaaccttctcaacgaatggaagggtaaactagcaactcaaaaagcccagagtgagaacctctttacggtcatcaatactggcttgcacaataaggtggacaccgtcagcacgattgtcgatgtagcggtttgtccatttaaggaattgcatccgacagagggcttcaagaaaatggccgctttgagcttgccagactaccacgtagaagatttagatggacatcttgtagaagcagagattgaggacttgggagcaagctttggctataccctgcctaaggataaattccgtcaaccctatattgcacgtcaagtgcgcgtgacggttccagttcacctagcgcctctttcttggaccaccttccagctcttagaaggcaaagcacctcatcatgatggtctgttccaaaatggggtgatcgatacgccatttgtaacccttagtatcgatgatggcttgaccctctatgataaaacgaccaatgaggcttatgaggatttccttcgctttgaagatcgtggggatatcggaaatgaatatatctacttccaaccaaaaggaaccgaaccgatctatgcggagttaacagcttatgaggtcttggaaaacaatgctcgctatgccaaaatcttgctcaagcatgacttgacgatcccggttagcgcggatgaacaattggatgcggagcaaagaggcattatcgagtttatgaaccgcaaggcaagtcgctcagaagagctgacaacgatccctcttgaaacggagatgaccatctttgtagatgatccacaaattcgcttcaagacgcgctttaccaatactgccaaggatcaccgcatccgtcttctggtcaagactcacaatacacgtccaagcaacgattctgaaagtatctatgaggttgtgacacggccaaataaaccggctgcttcttgggaaaatcctgaaaatcctcaacaccagcaagctttcgtcagcttgtatgatgacgtcaaaggggtaacagtggccaataaaggattgcatgaatacgaaatccttggagacgatacgatagctgtaacacttctccgtgcttccggtgaacttggtgactggggctatttcccaacaccagaagcacaatgtttgcggaactttgaggttgaatatgcagtagaatgccatcaagctcaggggcgtttctcagcctttcgtcgtgccaaagctttgcagacaccgatgaccagccttcaagttgaaaaacaagaaggaagtgtagcagcgtctggtagcttactcaagcatacagccttgacgcatcctcaggtttgtccaacagcctttaaggtagcagaaaatgaagaaggttacatccttcgctattacaacatgagccaagaaaatgtgcgcgtgtcagaaggacaacaaacggttgtcgatcttctggaacaaccgtatccggtccatacaggtttattggcaccgcaagaaatccggacagaattgatcaaaaaagaagaaatttaatttcaaaaagtaaacacaaacagaaaggaggagcgaaaaagtaagagccaactgctgattcgctccttttgcaggtgaaagcaatgaccattgcaacgattgatatcggagggactggcattaagtttgctagtctaactcctgatggaaagattttagataagaccagcaccccaactccagaaactttagaagatttgttggcttggttggaccaacgcttatcagaacaggactatcgtgggattgctatgagtgtgccaggtgcagttaatcaagaaaccggggtgattgaggggatcagtgccattccttacatccatggtttttcttggtatgaggcgctagctcatcaccagctacctgtccatctagaaaatgatgccaactgtgttggacttagtgaactgctagctcatcctgagattgaaaatgcagcctgtgttgtcattggcacagggattggcggggctatgattatcaatggcaaaattcaccgtggtcgccatggcttgggtggagagtttggttacatgacaactatcgaaccagcagaaaaactcaataactggtcacaactagcttctacaggaaacatggttcgttatgtcatcgaaaaatctggtcagactgactgggacggtcgcaagatttaccaagaggccgcagcaggcaatgctctttgtcaagaagccattgagcgtatgaatcgtaatctagctcaaggactcctcaatattcagtacctaatcgacccagatgtcattagcctaggtggctctatcagtcagaaccctgattttatcagaggggtgcaaaaagcagtagacgcctttgtggaaagatatgaagaatatacaatcgcaccagtgattcaagcttgcacctaccaggcagatgccaatctctacggtgcccttgtcaactggttacaggaggaaaaccaatggtaagatttataggacttagttccaaacaagcccaagctgttgaagcattaaaacatcacatttctctaccagatgtagaagtggcggtcactcagtctgaccaagcctccatctctatcaagggtgagggtggtcactatcaattgacctaccgtaaacctcatcaactctaccgcgccttatcggttctcgcaacagctttagaagaaggtgataaggtagagattgaagaacaagcagcttatgaagatttagcttacatggctgactgttcgcgaaatgcggttctaaatgttgcatctgccaagcagatgattgaagttttggctctcatgggctactcaacctttgagctctacatggaagatacctatcagattgaagggcaaccttattttggttatttccgcggggcttatgctgctgaagagttacaggaaatcgaagcctatgcccagcagtttgatatgacttttgttccttgtattcagaccttggctcacttatcagcctttgttaaatggggtgtcaaagaagtccagcaacttcgtgatgtagaggacattctcctcatcggcgaagaaaaagtttacgacctaatcgacggtatgtttgctactttgtctaaactacaaactcgcaaggtcaatattgggatggacgaagctcacttggttggtttgggacgctatctcatcttaaacggtgttgtggaccgtagcctcctcatgtgtcaacatttggagcgcgtgctggatatcgcagacaagtatggtttccactgccagatgtggagcgatatgttcttcaaactcatgtcagcagatggccagtacgaccgtgatgtcgaaattccagaagaaactcgagtttttcttgaccgtcttaaagaccgtgtgaccttggtttactgggattattatcaggatagcgaagaaaaatacaaccgaaacttcggtaaccaccacaagattagccaggatattgcctttgcaggtggtgcttggaagtggattggttttacgccccacaaccaatttagtcgcttagtagctattgaagccaataaagcctgccgtgccaaccagatcaaggaagtcatcgtgacaggttggggggacaacggtggtgaaacggcccagttctcgatcctgcctagcttacaaatctgggcggagctcagctaccgcaatgatttagagcgtctgtctgctcactttaagggcaatacaggcctctcagttgaggactttatgcagctggatctggccaacctcttaccagacctgccaggtaatatacatggtatcaaccctaaccgctataccttttatcaggatgttctctgcccaattcttgacaagcacatgacacctgaacaggacaagcctcactttgcccaggcagctgagactctttctgctattaaagaaaaagctggcgcctacgcctatctctttgagacccaggctcagttgaatgctattttaagtagcaaggtggatgtaggtcgacgcatccgtgaggcctatcacgcaggtgataaagagagcttgcgacagatttccagagaagaattgccaaaactcagaagccagattgaaaccttccatgacctctttagccaccaatggttgaaagaaaacaaggtctttggcttggataccgtagacatccggatgggtggactcttgcagcgcatcaagcgagcagaaagtcggattgcagactatctagccggttccattacacgaatcgatgaactagaagaagatatcttgccatttaatgatttctacggagatcaggacttcgcagccacaacggctaaccaatggcataccattgcgactgcctcaaccatttatacaacgtaaaaaatgccaagtcggatgacagaaatctcatacgcggtcgataggagtagaagaagagttgtctttacgatcacccttttctactccttttttaaagctatgtcataaatttgtagaattttttctataattaggagtttgaaaatgtaaatgggctatcttataataggtgatgtaaacgctaccaaagtaaataaacacgctcaaggctcaaaggggggagttaaatgaaaaagtttgtaaggactctgagagaaaatttcatttttcttttaatggtcttacctggtgcagcgtggttaatcttattcttctatattccggtttttgggaatatcgtagcatttaaggactatcatattacgggagagggcttcattgacagtgtcatgaagagtaagtgggttggctttgacaacttcaaattcctctttagttccaaagatgcctacattattacaagaaacacggtattgtacaacttaggattcatcttcttaggattgattgtttccgttgggatcgccatcatctttagtgagttgagatcaaaaagagtggtcaaggtgcttcaaacctccatgctcttcccatacttcctatcatgggttatcatcagcttcttcaccgatgccttccttaacgtggacaaaggattggtcaaccacatcttaacttcatttggcatgaaggccatcaatttctattcggaattgtggatctggccagcgcttctcctcttcttaggaatctggaaaggctttggttatagcagtgtcatgtactatgcaaccatcatgggaatcgatccaaccttctatgaagcagcgaccgtggatggtgcgtctaagtggcaacgcattcgcaacatcaccattcctcagttgtcttccttgattacagtcttgaccattcttgcagtcggaaatatcttccgcgcagacttcggtcttttctaccaaatcccgcataatgctggagcgctctatagcgtaaccaacgttattgatgtttatgtctacaacggtttgaccaagtcaggggatatcgggatgacagcagcagccggtctttaccaatcggtagtcggtttggttcttgttttgatctcaaatatcattgcccgtcgcattgataagaatgccgctctcttctagaaaggaggatcgtatgaaaaaatcaaccattcaaaaagaaaaaattgataatgtcgggatccattctttcagtaagaagagcaacttcttctttaccttgttgttgaccttggtcggcttgacctgtgtgcttcccttcatcttcgttgtcatgatctctttgacagacgaacaaagtttggcagtccatggcttccaattctggccagcaaaatttggatttgatggttatctcttcttggtacaattcaaagacaaaatcttgcaagccctcttcattaccttgtttgtgaccattgtgggaacagcatgtaatgtctttatcaccacaacttatgcttacgcaatctcacggagtacctttaaataccgcaagttctttaccgtattttcactccttagtatgctctttagtgcagggttggttccaagctacattgtgaccactcaactcttgcagttaggtgataccatcggggctttgattatcccaatgttgctcagtccatttaacatcatcttgatgcggaccttctttaaacggaccattccagaagctatccttgaatccgctcggatcgatggggcaagtgaaacacggatcttcttccaaatctgcttgccattgtctctaccagggattgcgactatcagtttgttcactgctttagggttctggaacgactggttcaatgccctcctctatattaagagtgacaacctttacccattgcaatacctcttgatgcaaatccaaaacaatatggattacatcgctaaaaacgtcggggtatccggccaattggcaggagctgtacaatccatcccacgggaaacaggacgtatggccatggtggttgtggcaacagtgccaatcgccattctctatccattcttccaacgctactttgtaaaaggcttgaccatcggtggtgtgaaagaataacatcgttcattgaaaatcagcaggattttcaactcataacttagtctaaaaagaaaataacataaaggagatttttcttatgaaaaattggaaaaaatacgcgttagcatctgctagtgtcatcgctcttggagctactcttgctgcttgtggaaaccttacagggaacaacaagaagtcagcaacaactgaagacggtaaaccaatcatcaagatgtaccaaatcggtgataaaccagataacttggatgttcttcttaaaaatgccaacaagatcattgaaaagaaagttggcgcaaaattggatatccaatatcttggttggggtgactacgcacaaaaaatgaacgttatcatctcatctggtgaaaactatgatattgcctttgctaataactacgtgatcaacgctcaaaaaggtgcttatgctgacttgacagaattgtacaagaaagaaggaaaagacctttacaaagcacttgacccagcttacatcaaagggaacactgtaaatggcaagatctatgctgttccagtagcagctaacgtggcatcttctcaaaactttgccttcaacggaccacttcttgaaaaatatggtatcgacgtttcaaacgtcaaagactatgcttctcttgaaccagtcttgaaagctatcaaagaaaaagatccaaacgttgttccatttgcaatgaacaagagctacggtggaccttcagatgacttcgactatgtggctgttgatggacttccattcgttgttgacttgaaaggtgacaccactaagatcgttgaccgttacacaattcctcgttatgtagaaaacttgaagactcttcacaaatactacgaagcaggatacattccaaaagacgtagcaacgagcgacactggttatgatctttctcaagatacatggttggttcgtgaagaaacagtaggaccagctgactacggtaacagcttgcttactcgtgtagcaaaccgtaagatcgaaatcaaaccatttactgaactgtacaagaagaacaatactactcaagtagctaactttgttatctcaaacaactctaagaacaaagaaaaagccatggaagtgttgaacctcttgaacactgatccagaactcttgaacggccttgtttatggaccagaaggcaagaactgggaaaaagttcccggcaaagaaaaccgtgtcaaagtcttggatggctacaacggaaacactcacatgtctggatggaacactggtaacaactggattctttacatcaacgaaaacgtaacagatgaacaaattgcacaatctaagaaagacttggaaactgcaaaagaatctccagcacttggcttcatctttaacacagataaagtgaaatcagaaatcactgctcttacaaatactttgaaccaattcgcgggtgctatcaatactggtactgtggatcctgaagtagaagttcctaagatgcttgaaaaattgaaatcagaaggtgcttaccaaaaagtgcttgacgaaatgcaaaaacaatacgacgaattccttgcttctaaaaaataagaacaggtagtgcgaaaaggctttggagggatctccaaggcctttcatattgaagagaaagtcctcttagaaactttccttaggtgagtacggacgtcagcgaacttctacgaagttccatgacttagttttgaacctaaagtttcaaaactcccgagtgctagaaacaaaagtgtttctagcacttttctcacggcggaaagtttcggtagatgattgaataactttaactcataaaatgtttttatttttatataattttatagatctgtataaaagaacagttctttatgaaaatagaactgtaaatgaaaatcaatatttcaatttaccaatgcaaatagggggaaagcgttttatttttatggtataatagaatcactaattggaaaagaggctgaatgatgggaaaaatcatcgagttcatttttacgagagtctatgttgctatgctggtaacagggattttttgggtcttgacgatctgtgggggtgttctgctaggagtaggaccggctagtgccactatcatgagcctctatgcggaaaatggcatgaactacaaagactatcattggtcacgcgcttggggactcttcaaagaaaatcttgttccggccaatcaagtcttttacaccttctttgccattgaaggaatcctcctctatggcatgtacctcatgatccagattcctcacttgaatttcttccaaattttggttctcctgtttaatctagttttcctcttggttgcgcctctagcttacgccgtttatttgaaattgcaagtgcattttgctctctcttatgccaacagtatcaagctcagtttgatcggaatgttgctggacattcgtccagttcttaagctcatccttggaacagcactacttggcgtcattagctactatatgccagcccttctcttttttgtcttgatcggcgtctggcatttctttgtcaatgatatctttgaccctgtttatcaaaatatccacgaaaaattggtatcctaacgatgaaaaaaatctggttaagtacgcttttaaaattctacgcctatgtcatggtggtcattttgaccattatgggtctcgtcgtagcggggatctcttggaaaaaccagcaaactgaagccgatcggattgcccaacgggtcttgactgaagtcgtgacggatctcgagacctcttatcagcgggtcacacaagaagggcgtagtctcgttgaaaaccctgcaaagttagaaggggtttatcgctattttaccttgtcaccatcggagtatgagacttggcgattgaatgcccagttcccttcttatatccaattgtccctacataagaatattgacagtctctatttgagcaataaaaacatcgagggcatcgatgtcaccttgtcggattacaagacagtatttgtctctacccggcaatcgaaggggggtaagcaagtttccgcggaccattacaaggctcctgcgacagccattccggttcctttgacagatccgactacgggtgctggagttgggattgcttatatgactctggaccaggaaattttgacggcagcgattgacaatgctagaggagatctaccggttgctgtgcggatcttcacgccctttgggaaagaaatgtaccatgaaggggataaggggcaatcaaaagatgttaaatggcaaacccgtagcacgatctatggctacaaggtggatgtagctgtttctgaaagttatctggtcaaaaagggtctagctaatctgacaacttttctctccattgctttcctgattttcttgatcctttacttgttattacggcagattttcaaaaattaccggcgtcaagtcctcgatttggtcgataccatgaatctgatcagtcaaggcgatagtgaacgacggattgatacctcgaccaaggaccaagaactcttggttatcgggaatatgatcaataccatgttagacaatatggataagaacattcgagatatctaccagctgcagctcagccaaaaagatgccaatatgcgggccttacaagcccagatcaatccccacttcatgtacaatacactggaatttatccggatgtatgccgtgatgcaagagcaggatgaattgggtgatattatctatgagtttagtagtctcttacgcaataacatctcagatgagcgagtaacgacggttgaaaatgaactcgaattttgtcgtaaatacagctacctctgtatggtgcgttatccaaaatcgatcgcctatggctttaagatcgatccaggtttggaaaagatgaagattccaaaatttaccatccagcctttggtcgagaactattttgcgcatggggtggaccacaaacgcaaggacaatgtgattagtgtcaaagtcttgcaaggagaagggcaagtcatgattctagttactgataatgggcgtgggatggaagaagaacagctagaaaaaattcaagagatactggccaatcgcaatcctcgctcagaaatcgaagaaaagagtggccggcagtccatcggaattgtcaatgtccatgaacgcatgctactctattttggagatcgctaccatatccaagttttctcccaacctcaccatggagtgacctatacgataaccattcaagatgaataaaggagacagaatgtacaaagtcttattagtagacgatgagtatatgattacagaagggttaaaaaaattaatcccctttgaccactggaatatggaagtggtcgcaacagcagaagacgccgaccaggcccttgattatgtgcgagaacatccggtggatgtggtgatcacggatgtcaatatgcctggaaagaccggacttcagatgattgcagagatgaaggatttgatgccagatgctgcttttatcattatgtcaggctatcaggattttgaatatgtcaagacagccctcaatttgcgcgtggcagactacctgctcaaacctgtcaataaggtggagatgggcaatatcctagaaaaaattcagcaccaaatccagcaaccaagccaagagttggccaaccgcttgattcacgatgatatttctgaggaagagttttgtcggtatatcgcaggacgaaagtcattgtggattggggttgctaaggagaaaaaaggctttatcagctcgtcttaccaagttctcgggcaaaatcttcaactctttatctcagatcaagaagaagaagccatgattgagaaggcctttgagccaccttataaggagcactttcatcaatttaaggacctagtggagcggagcctcttttatggggcgacccctctcaatcaagatgaagaagtcttccattactacgagccggcctatcgggtgatcatgcaaggaaatatccaacagatcttagaagaactggactggttagaaaaaatgatccttgagaagacacctaaggtttcactgaccaagcagctctttatccaatttttgatggatgtctttcatttgtttgaatacctgcaaggagatgatttggccgatgtggtcaagaaagtccatgatgctgccacctttagcgagatgattggctttatccaggaagagttgtctcgtttcttatcccactatcggatgaatgaaaatgtagcgagtgtcctccaagtgattagccgcgattaccaaaaagagctgtcactcaaggacatcagtcagggtctctttatcaatccagtctatttaggccaattgattaaacgagaaaccaatgcgactttcgcagaactcctcaacaaacagcggatcaaggctgcccagcagctcctcttatcgaccaatgatagtattgaagatatctgctacaaggtcggttacagtaatgttggctatttctacaaggtttttcgcaaactctgtggaaaatcgcctaaaacttatcgcttacaagtcatgacagagcatacagaagatgagtaaaaggctgagacaaatcgtctcagccttttaattgaagataaaatcttcttagaaactttccttaggagagtacataacagaaggttagggactctaaagctaagttttgagtatttttttatttgacaaaaataagtagacggtgtatactttataaaaagtagacaacgtatacttcgataagggaaggtggtcaaatgaaacggaatacggaagaactgaaagaaaagttaatttcggtcggcattgaagaaatcagaactaacgggattgaccggatgtctatgcgtacaatagctcaaaaatgtggggtgactcatggagctccctataagcattttggaagtaaagatagatatattcaagttgttatggaacacttatcaatgttctttttgaaaaatatgatacttggaattgatacttccatagatgcaataactcaactaactctgatgggctgtaactttgtaaggtttgcccaagaggaaacctatctatttgaagcattatttatcaaatttccatataactatatggagttgttccaggaaactatttcagtcaactcctctttaccaggatttgaacattttaagtcggtagcgttaagacttaaagatgaggaaaatctttctagtggtgacgcagaaattttgatccatttttggagttttattgctggtttggctctattggtaaggagtcctgttggagaaagctttaaagaaaatgatgttcaaaagaccgtcagaacgatgcttgatatttatataaaaggagatagctgatgaatgttttaataatctattcacatccgaatgaaacaagttataatgcatcaatccttcaaactgtgcaaaagcatttagcaccagagcatagagttaaaatagtagacttatataaagaaaactttgatccggttttacgttttgatgaaaggcataaaaggagagatttacagcataatgaagatatgaaaccatatagagatttattgagttgggcggatcagttgatttttattttccctacttggtggagtggaatgccagctattttaaaaggttttattgatcgtgtttttgttgcaggttttgcttatcagaatggacctcgaggtccggtggggcaactagatggaaaagcgtggatcattacgacgcataatacgccaaaaatttttcttcctttttctcaagactacgcaaaggttctaaaatctcaaatcttgaaaccctgtggtattaaaccggttaaaatgacacaagttacacgagtggagtatatgagtgatcgtcaacggaaagaagaactcgaaaaaatcgtacagatagccaaaaggatataaaaacgtgcgttacaagtcatgacagagcatacagaagatgagtaaaaaggctgagacgatttgtctcagcctttttactttgtattttaagtcctttgtatcttgattttcccaaccagcagctcagcttcgatggtgatttctgtaagttggctccagtcgattttttcttggtcaacgtgaaatagaaggggggtcatggcgaggaacgcctggcgttcttcaggagttaaactcttggtaaggctgaccgtttcggatgagaggaactggcagtggtcttcaaaatgctccaaaatttcctggttggagtaagattgcttggtcaattgatcttgggccaactgacgaatttcttttagatgagaagaggttgggacgaccttaatgatcaccccttctgtctttaagacacgttcaaattcagcgtaattagccggggagaagatgtccaaaatgacctccatactcttagattgaatgggtaaatgagccaaatctcctacaaaccaattgaccttccagctagcatcactcttggcagctagttgtacggattcctttgaaagatcaaatgcatagaaagtagcttggggataagcttcttgtagttttcgggagtaataaccttctccgcaaccgatatctagaatcttgccatcacaagtcggaattttttgtccgatcgctgttagaatcggctcataaaaccctgcttctaagatcagctggcgattttggaaattttctttgtcatagtcctttgattgcttgatctggggagccaggttaacatagccaaatttcgccaaatcaaaggaatgggccttgggacatttaaaactagtacccacaagttctaggtccaattgacagatgggacaggcaaaggcagtggctgtttgaaatcgttgtaattttggtttgatcggtgtattcatattagtagtgtaacaaaagagcctctagatagcaactgatgctttaatgggactaagtcacacttttttaacggttctacgcggaattgagtggaccttgagtttctttatctaattttgtccactggattgttcaggacggttttcaattctggacaatatttacttgtctcaaattcaatgatctcatattgagcaatcttattttgatagaatggatcgtgtgcaatgatttcttggacagcatctttattttttgctctcatgagaatgataccgccggtccttggattttttcttccagatgcgataaaatgaccttctgtataatactgatttaaaaaatctatgtgtttttctaagaatttttcaacttcatcaaggggcttgatataggtaagatttacaataaacataagtgactcctttaaaataaatgataaatagattataatactttacaaactacctgaatagtaggcacatttttgtaaggagaaaaaatgttaacaaataaaaattggaactgtagtatgtctcgagtcttagatgtggttggtgggaaatggaggatgaatatattatgggttataaacaagcataagaaagttcgtttcaatcaattgagaagagaagttgaagggattacaactatcagtttgacacgtggattagatgttttaatagagctccaattgattgagaaatatgattatgagtctctgcctcttcatacaggatatgagctgacagaaaaagggaaatcactgatgccgattttaaaggacttgaatcaatggggaaaagaatggttgcattaaattttcttctttttgtcactttcatcttgccacttaggttctcattttgaccgcttatcccaaaaggccgttttttaaacggcttttttgctagactgatattgtcaaaaaggagagagaacatgatattacaagctaaaaacatcagtaaacggtatggaaatcatctagcggttgatcatattcacctacagtttgaaaagggaacgtttaatgcgattctaggaccaaatggggcggggaaatcaacgacgatttccatgttgattggtttgaaacaaccaacgcaaggcgacattatttatgaacccggtactaaaattggtgtggtcttccaaaccagtgttttagatgagatgctgacggttagggaaaatctgaccattcgtgccagacagtacaaaggcctaaaaccaaatcgtgtgtctgatcttattgatcgactaggcctgtcagctttccaaaagcagaaatatgggacgctttcaggcggccaaaagcgtcgggttgacattgcgcgtgctctactgcacggcccagatcttcttttcttagacgaaccaacgacaggtttagacattcaaacccggaagtctatttgggatttgctctatcaattgcagaaagaagagggaatgactgttgttttgaccacgcattatcttgacgaggcagatgaagctgatcaaatttatattgtagaccatggggaagtgattgctcaaggatcggcactagatattaagagtcaatatgcaaaaagcatcttgaagattcgtttcaaggagagacagcagatagaaagtctcaaaacttcgggaatgtcagtagagcaacaaagtcaattggagtatgtttttcaacctgagagtgaaagggaagccattgattacctgacacaagttagagataatctagcccattttgagtttcgtccagggaccatggatgatgcctttattgcacttacaggaagggaggttcgctaatgctagccttactaaagcgaaattttttattgtacttcaggaatcgttcaggagttttcttctctctgttgggagccttgatttcctttgttctctatattatttttcttcaaaaaaatctaacagatgcttgggctcagctccccaatagtggtcctgtgttaaataattggttaatgagtgggacgctggctgtgacagggattacgacaagtctggcttccctgactcagttagtaaaggaccgtgaacatcaagtagatcaggatctttatttatcggatcaagggaagtggcggttagcattttcgtatctaacgagtgcgatcatcatttctttttccatgcagatccttatgtatgtgctgatgtgtggctattttagagaagttccaaccttatctctattacctgaagtgctcctcattatgctccttagtagcctgctttctagcttagtgaatgccatttttgtttattttttccaatccgtagacagtcttgggaagttttcgaccatagtgggtacagcttctggttttttggtagggacttatgttcctttaggtgttttacccacttttgcacaatcactaatgaagtgcactccagcaacttatattgctgcactttatcgacaagtcctcatgaaagaagcattaagtgagacctttaaaggtcaagataatcttcttcgagagtttcaagaaaaaatgggtgttcagctcaaatggcaaactttattgacaaaggaacaaacataccttatagtgttaggagatattcttctagctttggggatttggatttccttggcaaaaagatcgagtaaaagaaagtaagtgagaattggagtaggaatgaagattcgttttgaggaaaaacaagatatcccagaaaacgacccctgtgtggtcattcaagccaagcaattatctgatcaagcacgagaggtgatggagtatctcgaacaattttcgacagtgaatcaagtagtgatccctatcaaaacagatgatcatttgatcatggtgaaaattgatgacattattctagctgagattgataagaatcagctaaccatttatacgatagacaaaacgttcaccatcagagatactttgataaattttcaacatcggattaatcgtcgtaattttttacagatatcacgccacgcggtgatgaatatcgaccatttagaatcgctatcggatagtttttcaggcaatatgatggctaaactgacacgtggagtaaaatcaagtgtcagtcggaaatatgtcaaatccttgatggattatttaggggtataggagaaagtgatgaaacgagttatagcttattttgtatctggtatgaggacaggatccttcttttatttgtgtttggtgttattatcccatgtctataccaacatcgtctatcccgctgtaaatgtccgcaacatcctagcgatatttttgatgagtgggacaatgggggtcttgaccttcattcttgaggaagaagagtttttgacctatagtttgcgtgtggctttgcatttagttgtgacagctgccatcttagcattaacctacttgttttttggctgggggacagccttacggagcccgattccttggttgatctttctagccatttacggcctgatctggctgtaccagatttggcaactccataaaaaaactcaacgaatcaaccaagctttgttgcatcgcagaaaagggaaatagtcccagaaaaagtgtataagaaaaccacgaagttcatacgaaacttcgtggttttactttcttaataagtcaaaacaaagtattttttcttaccgcgacggataacggtcaattcattttctaatttatcgctatcgctcaagacatagtcaaggtcttggatgcgttcgccgttaacgtagatagctccgttttgaacatcttcgcgggcttggcgtttagaattgaccacaccagctgtgaccaagagttcaacaatgttgaggttgtcttctgcttggacctggtagtttggcacaccacgaaggccttgtttgagttctttgacagaaaggtttttgatgtttcctgcaaagagttgttcggtgatgttgagggcttccttgtaggcttcttcgccgtggacaagggtaaccacttcacgtgccaagatcttttgagctaggcgttcatgaggagcaacctcaaactgtttgcggatctcttcaatctcatcaagtgacaagaatgtgaagatcttcaagaagcgcacagcatccgcatccatcacattcatccagaattggtacatttcgtatggagatgttttgtctgcattgagccagaccgcattgccttctgatttaccgaatttcttaccagttgcatctgtgatcaaaggcacagtcataacatgaccagttttatctgctttacgacgcatcaactcagtgccagctgtcatgtttccccattggtcagatccaccgatttgaagggttacattgtgttcttggttgaggacgtagaagtcatagccttgcataatttggtaggcaaactctgtgtaagaaatccctgtctcaatccgttttttaacagattctttactcatcatagcattgaccgtaaagtattttccgacatcacgaaggaagtcaataaagctaatgcttccgaaccaatcgtagttgttgaccatttcagctttgttgtcgccattttcaaaatcgaggaaacgagacaattgcccttgaatggaacgaacccattcttgtacagtttcttttgtttggagactacgttcagcatctttgaaggacggatctccgatgagaccagtcgcaccgccaacgagcgcataaggtttgtggcctgctagttgaaggcgacggctcgtcaagatggcaaccaagtgaccaaggtgaaggctgtcagcagttggatcgtagccagaataataagaaacctgaccttcttccagggctttgcgcaaggcttcttcatccgtcgtttgaaataccaaaccacgctcttttagctcatcaaaaatgtgcatgtgtcttttctcctttataagtttattcatttctctattctaccataaaccacagaaatggcaatgctttccatcattttcttgaccttatccaagaagagtgagtgacgatttctacgctcttgtgattgaaaacaaaggggctaatctgctataatatagggaacaaggagaaagaatcagtgaatcaattaaaagagaagctgcaagatttttggaagaagatccaaaaattctttgcaaatatgtatacagaaactccaaataaggaaaaaaaagaagagagcagttggtctattggggatatttttgcgacctctttacggaccctcaaactcttgtgggatgtcatgatagcccttgctatttgcctctttttatttggtgcagggatcgggattggttatgctgcgagtctctttaacaatgttaaggatccgaagacagaggaattggtccagcaggtgcgtaatgttagtagcgtttcaaaactgacctattctgataagagtttgatttcagaagtagacagtgatttgatccgcacaccagtagctggagatgctatttcagacaatgtcaaaaaggctgtgattgcaaccgaagatgagaattttgaaagccacaagggggttgtgcccaaagccgttcttcgggcgacgcttggatctgtagccggcgttggctcctctagtgggggatcgaccttgacccagcagttgatcaaacagcaagtcgtcggagatgctccgacctttactcgtaaggcgacagaaattgtcgacgcccttgccttagagcgagggatggataaaaacgaaatcctgaccacttacttaaatgtttcaccttttggacgaaacaatcggggacaaaatattgcgggtgtggaagctgcggctcaagggatctttggagtctctgcgaaagatctgtccgttccacaagcggcctttatcgcagggctgccacaaagtccgattgtctactccccttatgctgcagacggtagcctaaagagtaaggaaaatctagagttaggtttggcgcgtgccaaagacgtcttgttcaatatgtacaggacaggagtcttatcgaaaaaagactacgaaacttatgctcagtatgatttgaccaaagacttcatcgcttcggatggcatcgagaaaacgccacatgactacctctatttccaagccatgaaagaggcgaaagaggccatgtatgattacttgatcaaacgagacaatgtgaccaagcaagacttgaaaaataatgagacggttaagtcttatcaaaaattggctgaaagtgagttgcgtgaaggtggctacaccattcaaacaaccattaacaaaccggttcacaatgcgatgcaggctgcagtggcgaattttggaaacgtcttggatgatggaacgggactggtagaagttgggaatgtcctcatggacaatcgaaccggtgcgattttaggttttatcggtggacgtaattttgatggcaaccaaaacaaccatgcctttgatactgaacgttcaccagggtcgactatcaaaccgctgttggcctatgggattgccattgaccaaggcttgatgggaagcaatagtatcctttctaattacccaactaatttctcaagtggcgaaccgatcatgcacgtagataaccgaggaacggctatgatggatcttcgtgaggctctcaatacttcatggaatatcccagcctattggacctaccgaaccctacgtgaaaaaggggtggatgttccctcttacatgaagaagatgggctatgatatctctgaatacggaattgagagtctgccgatgggtgggggtattgaggttactgttgctcaacataccaacggtttccaaaccattgctaacaatgggaactacctcaaacgctacatggtggagcaaatcatcgaccgagatggggatgtagtctacaagcacgaagcagatccggttcgtgtctactctccagcaacagcaacgattatgcaggatctcttgcgtggggtcatcacatctggtgccacaacgacctttaagtcacggattagccaagtcaacccaacgctggcaggtgctgactggattggaaaaactggtaccaccaactcaaacggggatatgtggttgatgttgtccaccccaaatgtttctttaggaggttggatcggtcatgacaacaatgcttccatgcaaaccttgaccggatacaacaacaatgctcaatacatggcgcagttggcgaatgcgatctaccaagcagatccaagtctctttgggattcaggataaattcactctcgataagagtgtgatccgttctgaagtgctcaaatcgactggtgaaagaccgggccgcgtcaatgtcaatggccgggatatcgatgtgagcggtcaaacggtaaccagtctttgggctaaaaacggagcgccaaccactcaataccgctttgccatcgggggatcggatagcgattatcaaagtgcttgggcagcaattctcggcaataccagtggcaatcagtcgaataataagaacaattcgacaaccaatagttcatcaagcaatagttcaaatcgaaatagttccaatcgcggcaatcgacgctagtctgatccagtagaaaacctagagaaagccttgatttttggagcaaaaaacgatataatagtgataactaatttgtcgtgtgctttatttgaaatattgtccaaataagagcttacagcagttaaatcttacttgaataagtcgatttagctgctctttttgtgcctatttttcaggaaaaccctagtttgttacacaaatttaatttttctaaaaattacaaaaagcgacgaataaggtgaagagacagctcttcacgtgatgcaaatcacaaaattgtagttaaaaccggataggtggtaggagtgatgttaccaagctatcctagtatagaaaaaggagctaaaaactttggcaggacatgacgttcaatacgggaaacatcggacccgtcgtagtttttcaagaatcaaagaggttcttgatttaccaaacttgattgaaatccagacagactcattcaaagatttcttggatcatggcttgaaggaagtatttgaagatgtgcttccaatctcaaacttcacggatacaatggaattggaatttgtgggttatgaaatccgcgaacccaagtattcgcttgaagaagcgcgcattcacgatgccagctactcagcaccaatctttgtgaccttccgtttggtcaacaaagaaacaggtgaaatcaagacccaagaagttttctttggtgatttcccaatcatgactgaaatgggaaccttcatcatcaatggtggagaacggattatcgtatctcagttggtccgctcaccaggtgtctacttcaatgataaggtggacaagaatggtaagattggttatggatctactgttatccctaaccgtggagcttggttagagcttgaaactgactcaaaagacatcgcctacacacgcatcgaccgcacacgtaaaattccatttacaacgcttgtgcgtgctcttggattctcaggagatgatgaaatcatcgatatctttggggatagcgaattggttcgcaataccatcgaaaaagatatccacaaaaatccaatggattcacggacagatgaagccctcaaagaaatctatgagcgtcttcgtccaggtgaaccaaagacagcggaaagctcacgtagcttgttggtggcccgtttctttgatccacgtcgttatgacttggcaccagttggtcgctataagatcaacaagaaactcaatatcaagaaccgcttgttgaaccaaacgattgcagaaccgttggtggatgctgaaacaggagaaatccttgtagaagctggtaccgtgatgacgcgcgatgtcatcgacagcatctcaggacaattggataacggtttgaacaaaatcacttacattccaaatgatgctgctgttttgacagaaccagttgaattgcaaaaattcaaagttgtcgctccaacagatccagaccgtgttgtcaccatcatcggaaatgctaatccatctgacaaagtacgcatcgtaactccagcagatatcttggcagagatgagctatttcttgaaccttgcagaaggaattggccgtgtagatgatatcgaccaccttggaaaccgtcggattcgtgccgttggtgaattgcttgccaaccaagtgcgtcttggactttcacggatggaacgaaacgttcgcgaacggatgtctgtgcaagataacgatatcttgacaccacaacaaattattaacattcgtccagtaactgcagcgatcaaagaattctttggttcttcacagttgtcacagttcatggaccaacataacccactttctgagttgtctcacaaacgtcgtttgtctgccttagggcctggtggtttgacacgtgaccgtgccggatatgaagtgcgtgacgtgcactatacccactatggtcgtatgtgtccaatcgaaacacctgaaggaccaaacatcggtttgatcaacaacttgtcttcatacggacacttgaacaaatatggtttcatccaaacgccataccggaaagtggaccgtgaaaaaggtgtagtgaccaacgaaatcgtttggttgacagccgatgaagaagatgagtacatcgtcgctcaggccaactctaagttgaacgaaaagggtggctttgctgagccaatcgttatgggacgtcaccgtggtaacaaccaagagttcccatctgatcaagtcgactacatggacgtgtctccaaaacaagtagttgccgttgcgacagcatgtattcctttcttggaaaacgatgactccaaccgtgccctcatgggtgccaacatgcaacgtcaggctgttccattgattgatccaaaagccccttatgtgggtactggtatggaataccaagcagcccatgactcaggtgctgcagttattgcacaacatggtggtaaggttacctatgcagatgcggataaggtggaagtccgtcgggaagatggttctttggacgtctaccatgttcaaaaattccgtcgttcaaactccggtacagcctacaaccaacgtactctggttaaagttggtgaaaccgttgaaaaaggtgactttatcgctgacggtccatcaatggaaaaaggggaaatggcccttggtcaaaacccaatcgtcgcttacatgacttgggaagggtataacttcgaggatgccgttatcatgagcgaacgcttggtgaaagaagatgtctacacatctgttcacttggaagaattcgaatcagaaacacgcgataccaagttaggccctgaagaaattacccgtgaaattccaaacgtcggggaagatgctcttcgtgacttggatgaaacaggtattatccgtattggtgcggaagtaaaagaaggcgatatccttgtcggtaaggtaacaccgaagggtgaaaaagacctttctgctgaagaacgtctccttcacgcgatctttggagataaatctcgtgaagtgcgtgatacttctcttcgtgtacctcacggtggagatggagtcgttcgtgatgttaagatctttacacgtgcaaacggagatgaattgcaatctggtgtgaacatgttggttcgtgtttacatcgcacaaaaacgcaagatccgcgtcggagataagatggccggtcgtcacggaaacaaaggggttgtgtctcgtattgttccagttgaagatatgccttaccttccagacggtacaccggttgatatcatgttgaaccctcttggggtgccatcacgtatgaatatcggtcaggttatggaacttcaccttggtatggcggctcgtaacttgggtatccatatcgcaacaccagtctttgacggagcaagctcagaagatctctgggatactgtgaaagaagctggtatggatagcgatgccaagaccatcctttacgatggacgtacaggtgagccgtttgacaaccgtgtttctgtcggtgtcatgtacatgatcaagcttcaccacatggttgatgataaactccatgcccgttcagtcggaccatactcaatggttacccaacaaccactcggagggaaagctcagtttggtggacaacgtttcggggaaatggaagtgtgggcccttgaggcttatggtgcatcaaatgtccttcaagaaatcttgacctacaagtcagatgatgtcaacggacgtttgaaagcttatgaagcgattaccaaaggtaaaccaattccaaaaccaggtgtaccagaatccttccgcgttcttgtcaaagaattgcaatctcttggtcttgacatgcgtgtcttggacgaagatgatcaagaagtggaacttcgtgaccttgatgaaggggaagacgatgatgtgattcatgtggatgaccttgaaaaagcacgtgaaaaagcagccaaggaagcaaaagcagcctttgatgctgaagaatcagaaaaataatcagtaaaaatgattgtcttgtgagaaacgaatgcttctagcaggatgattcgataacaagatacagacacaaggaggtggcaagaaagtttcctttcttcccccacctaagctgtattcaaatgaaacaagtatgaaaacaaggaaaggtaagaaatagtggttgatgtaaatcgttttaaaagtatgcaaatcaccctagcttctccaagcaaggtccgttcatggtcttatggagaggtcaagaaacctgaaacaatcaactaccgtacattgaaaccagaacgtgaaggtctctttgatgaagtcatctttggacctacaaaagactgggaatgtgcgtgtgggaaatacaaacggatccgttacaaagggatcgtttgtgaccgctgtggggttgaagtaacacgtgcgaaagttcgtcgtgaacgcatggggcacatcgagttgaaagcacctgtatcacacatctggtacttcaaaggaatcccttctcgtatgggattgactttggatatgagtcctcgtgcccttgaggaagtcatctacttcgcagcttacgtggtgatcgatccaaaagatacaccacttgagcacaaatccatcatgacagaacgtgaataccgtgaacgcttgcgtgaatacggaccaggttcctttgtagctaagatgggtgcagaagcgatccaagacctcttgaaacaagtggatctggaagctgaaattgctctcttgaaagaagaattgaagactgcaactggtcaaaaacgtgtgaaggctgtgcgtcgtttggatgtcttggatgccttctacaaatctggcaacaagccagaatggatggtcctcaacatccttccggttattccaccagatcttcgtccgatggtccaattggatggtggccgttttgctgcctctgacttgaatgacctttaccgtcgtgtgatcaaccggaacaaccgtttggcacgtttgcttgagttgaatgcccctggtatcatcgtgcaaaacgaaaaacggatgctccaagaagctgtcgatgctttgatcgacaacggtcgtcgtggtcgtccgatcacaggaccaggtagccgtccactgaaatcattgagccacatgctcaaagggaaacaaggacgcttccgtcaaaacttgctcggtaaacgggtggacttctcaggacgttccgttatcgccgttggtccaactcttaagatgtaccaatgtggtgtgccacgtgaaatggccatcgagctcttcaaaccattcgtgatgcgtgaaatcgttgcgcgtgatatcgtacaaaacgttaaagctgcaaaacgattggtcgaacgtggagatgaacgcatctgggatatcttggaagaagtgatcaaagaacacccagttctcttgaaccgcgcaccgacccttcaccgtttggggatccaagcctttgagccagtcttgattgacgggaaagctcttcgcttgcacccacttgtctgtgaagcctacaatgctgactttgacggtgaccaaatggccatccacgtaccactttcagaagaagcccaagcagaagctcgtatcttgatgttggctgctgagcacatcttgaatccgaaagacgggaaaccagtcgttaccccatctcaggacatggttttggggaactactacctcactatggaagaagctggtcgtgaaggggaaggcatggtcttcaaagatcgtgatgaagcagtgatggcctttcgtaatggctatgttcatttgcatacacgtgtcggaattgcgaccgatagcttggacaaaccatggacagaagcgcaacaacacaagattctcttgacaactgttggtaagatcctctttaacgatatcatgcctgcagagcttccataccttcaagagccaaacaataccaacttgacagaaggcgttccagctaagtacttcttggagcctggtcaagatgtgaaagcggcgattgagaaattggaattgaacgttccatttaagaagaaaaatcttggaaatatcattgcggaaatcttcaaacgcttccgtacaaccgaaacttctgctttcttggaccgcttgaaagacttgggttaccatcattcaacccttgctggtttgacagtggggattgccgatattccggtcgttgaagataaggcagaaattattgaagaatctcacaaacgtgtggaacaaatcaccaaacaattccgtcgtggtttgatcacggatgacgaacgctacaatgccgttacagctgaatggcgtgcagctcgtgagaaattggaaaaacgcttggtggataaccaagatccgaagaacccaatcgttatgatgatggactctggagcccgtggtaacatctcaaacttctcgcaacttgccggtatgcgtggtttgatggccgctccaaacggacggatcatggaattgccaatcctttcaaacttccgtgaaggtttgtctgtattggaaatgttcttctcaactcacggtgcccgtaaagggatgactgatacggcccttaagacagccgactcaggttacttgactcgtcgtttggttgacgttgcccaagacgtcattatccgtgaagatgactgtggaacagaccgtggacttgtgatccgtgccattactgatggtaaggaaatgatcgagccattggaagaacgcttgacaggtcgttataccaagaaatctgttaaacaccctgaaacaggtgaagtgatcgttggtccagatactttgatttcagaagacttagcacgtgaaattgtcaatgctggtgttgaagaagtcactatccgctctgtctttacatgtaacacccgccatggtgtctgccgtcactgttatggtatcaacttggcgactggtgatgcggttgaagtgggtgaagcagtcggaaccatcgctgcccaatctatcggggaacctggtacacagttgaccatgcgtaccttccacacgggtggggttgcctcaaataccgatatcactcagggtcttcctcgtgtccaagaaatctttgaagcccgcaatccaaaaggggaagcggtcatcactgaggtcaaaggggaagtcacagctattgaagaagatgcttctacacgtactaagaaagtctttgttagtggagcaactggtgagggtgaatatgttgtcccttacactgcccgcatgaaagtcgaagtgggagatcaagtttctcgtggtgaggctcttacagaaggatctatccaaccaaaacgtctccttgctgtacgtgatgttttgtctgttgaaacatacctccttgcagaagtacaaaaagtataccgtagccaaggggtagaaattggcgacaaacacatcgaggtaatggttcgtcaaatgattcgtaaggttcgtgtcatggatccaggagatacagaccttctcatgggtactctcatggatattacagactttacagatgctaataaggatgtccttatctctggtggagtccctgcgactgctcgtccagttcttatgggaatcacgaaagcctcacttgaaaccaatagtttcttgtcagcagcttccttccaggaaacaactcgtgttcttactgacgcggcgattcgcggtaagaaagaccatctcctcggactcaaggaaaatgttatcatcggtaagattattcctgcaggtacaggtatggctcgttaccgtaacttggaaccacaagcgattaatgaagttgaaattatcgaagaagtgccattaacagatggaacagtcgatgaagttcaaacagctgaagtcgtagaagaataagaaaattagtcggaactacaagttccggctttttttgaaaaaattataaaaatttattatttgaaaaataattgtataattattgaattatttttttaccaaaaatattagcccggtaaaagtcgtgctgtaaatacttacaattagtgattatatggatatgtattctaaacgtcaaaataataaaatgactaactattagtaatttctttataaaacccaaaatcggtttgacatttaaagtcattggcggtagaatgaaaaaagatgtacacaaattaaaaaaatgtcgaattacatgcatgtcgacgggggaagtttatgggaaaattgaaaataatggttgtgtttgggacgcgaccggaggccattaaaatggcccctttggtgttggagttgcaaaaacaaaaggaggttattgagaccatcacagtggtcactgcccagcaccgtcaaatgctggaccaggtcttagaaacctttaacatcgtacctgattacgatttggatattatgggaaaaagccagaccttattggacattacctctaaaattctgaatcaattagatccagttatcaaaaaagaaaagccggatatagtgctcgtccatggagatacgaccactacctttgcggcgagtctggttgccttttacaatcaagtccgcattggtcacgtcgaagctggtttgagaacctttgataaatattcaccgtatcctgaagagatgaaccgtcaaatgacggatgatttagcggatctgtattttgcgccgacaggcgaaagtaaggccaatctcttaaaagaaaatcatccggaatcctctattgtagtgacgggaaatactgccattgacgcgttgaaactcacggttcaagaggactatcaccacgaagtgttagatcaattggatccagataaaaaagtcatcctggtcaccatgcatcgaagagaaaatcaaggccaacccatgcgagcggtctttggagctctgagagaaatggtggatcaagaaccgactattgaagtggtttacccagtgcatcttagtccagcggtccaagaggcggcaaacgatctattaggagatcatgatcggatccacctcattgagcctctagatgtgctggatttccacaacttagcttcgagaagttactttatcatgtcggattcaggtggagtgcaagaggaggcaccatcattaggaaaaccggtattggtattgcgcgatacaacggaacgcccagaaggggtcaaagcgggaactttgaaattagttggaacggatcctaccgtcgtcaaaacgacgatgacagagctcttaaccaacgaaagcctgtatcttcaaatggcaaatgcccgaaatccttatggggatggaagagcttctgagcgaatcgtacaagccattaaacattactttggccagggagaggctgccgaagaatttcatgagggagagaaagaataaatgaaaaaaacggaaaagttaagtagatggttgctgattttgattgttttcgaagtacttcttttactttactgcttgttttttgcaagagagattctgattgaagaaggattgttctttgttttaggattattttctgctattgtcttatcggatttattgttgacatggaccatcctgttgtcatttgcccttgggattgtctttttggtggcgggtgttgtctatatcccatttcatcaagccttgctcttgctctttagttttccgatcttgattggaatcttgacccgaattcgctatcacctctttaaagagattgcaaaagtgaaggatcaagagccagaagcttacgcagattaccgcaaccgcatcgcttcttatggcggacaaaccaatgatacgattcaggccttactcattcactggtcgcatgaggaattgttcttccaattgcaaccgagagaatacaatcggaccttgaaccaaatcaactatttggtaacgcatcatctaaagccaaatgaaagcttgtattatgtatcagatggtaatttcttgatcttatctgctgatagcgagcgggatctgaagggcgattatatgacagtcttaaaaccacagttggaaggactggtgttccaaggagaagatggggtgcaagccatccaatttcagtccggctttcttgtagtagatcaatcaaatcgcaccaaataccatcgctataaagaaatgattcgttacttaaaacgtcaacttgaaacagatattattgtggaatattaggaggaagacatgtctcttacaaatatattttttaatatagctgtaggcatcagtgtattttttgccttgtgctttattgtattatttgtagcttatacggtgatttaccgccgtgtcaataaaaactttaaggcggtggaccatgattagtcaaattgtgatgattattgccttgatttcgatttggttatccttagcctggggcttagtaatcctcttttcagccgttcatttttggtttaaacacagtgattttcgtgtcaatacggatccgcttccttattatccaaaagtgacgatcgtcgtacctgcccataatgaggatgtggtcattgcacaaacagctaaagcgatccttgatatgaactacccacatgatcgtgttgaattactgctctttgcggataattgttccgatcgcacctatgaagagtgtttggctgttaaagcattgccagagtatgcaggacgtgatttgaccattatcaatcgaagtggaacaggtgggaaagccggtgtgctaaatgacgctttggcgatggcgactggagactatatctgcgtctatgatgcagatgccatgcctgaaaagaatgctctttatttccttgtgaaagaagtgctcaaagatccagaacgtcatgtggcttctttcggccgcaataaaacgcggaatgccaatcaaaacttcttgacccgctgtatcaaccaagagattgttgtcacccaacgggtccaccatgtgggcatgtggcatctctttaagattggacggattccaggaactaacttcattattcaaaccgaatttgtcaagagtatcggaggatggaaaaacggtgccttgactgaggatacggatatttctttcaagattatgcaaagtgggaagttgattgcgctagcctataattcagaagccttccaacaagagccagagactctgaagagttactatatgcaacggaaacgttgggccaaagggaattatgaagtggttctttccaacttcaagcatttatttggtaagggaaattggcgcgtgaagttagaagtgaccaactattcctgtgtcttcttctggtttaatgcggccatcgtcttatcggacttgatcttttttgccaatattctggctatgtgtatccatacagtggtgccaggtgtgcaaattccatttgcctttgattcagaaaatatctacattgcgcaattgatgctcttcaattggatcttgatgattgggctttacctgcttcagattaatgtagcgctggcttcacaatttggtcaagccactaccaagcaaatttggttggccttggctgcctatttcacctattctcaactgtttatcattgtgtcgattgatgccatctcttcgattgtgatggataaactattgcaccggaaagaaaccaaatgggttaaaacaaaacgattcgcaggataggagagattatgaatacgaaaaagatgagatatgtatggtttctagtcatcctttgcattttctgtttgaccttgtttttagcgagaacgagaagtaaagtggagatgcgaaatcgaatttatcgtcagtggaatgagcattttgttgtttcaaaagggaaagaatcctatgttcgaaccaccaatgatagcaatcaaacggtagtgttatccgaggcgcaaagttatggaatgatcattactgttgcagctgccgaaaaaggacaagcccaacaagcagactttgaccgactctatcactattatctaaatcatcgcttggaaggtacccaattgatgtcttggaaacaaaccatcagcaatggaaaagcaaaggatgaggatcataacgctacagatggtgatctctacatcgcctatgctcttctaaaagccgctcagaaatggccaaagcaagccaaagactaccaggctcaagccaaagcgattttagaagatattctcgcacacaactacaatgaagaaacgggtgtgttaacggtggggaattgggccaatcaggactcggagttttatcatttgatgcggacgtctgatacactgccagcgcaattccagatcttttatgaagtgacaaaagattcaaagtggttggacatcaaagaaaagatgttgcaacaactccaaacgatcagctcccaaacaaaaacaggtttactacctgatttcatctgggtagatgagcaaggaacgcgcgtagcggatccaaagacgattgaatccaagtatgatggtgcctactcgtataatgcttgtcgtcttccatacaaccttgttcaaagtaaggacaaaaccagtcaacaattggtgaaaaagatgcttaactttttcaagagtcaaagaaacctgtatgcaggttatgacttgaaagggaaggccttgaacaatcatcaggcagcaagctttttggcaccgattgtctatgcctctgaacatgaaaaaggctatttgaagttggtgcaacagaacaagtatatctttacacaagatctacctctgaacaactattacgatgcaaccatgacaaccatgattgcacttgaattgttctaaatacttgagaagagagagttccccaggatggtctgtccattttgttgggactctcttcttttgattctcgaaaaaaggaaccaatagcaattaggcagtctatttttgaaaaataattgtgaaaatcacctgaaaactacctgaaaaatcatgctctgagcagaaaacttttattctcaaaggattttctatataatagaggatacaaaggatggaagagtttatgtatcgagtgattgaaatgtacggggactgtgaaccctggtggtttttagaaggttgggaagaagatatcgtgagtagtcggaagtttgaagactattaccaggctttgaaatactacaagcagaagtggttggagttaaatgagcactttccaagttataagagtcggagtgacctcatgacgatcttttgggataccaaggagcaagagtggtgtgaggactgcagtgaagatgtgcagtttttccattcgattgtcctcctagaagacgagcataagatccctaaaagcaagctccgcccaggctacgaaaaggaaagaggcagtcgcaaacaccgttcttgtcaatatacactcgattcaaaaaaggggacgaccctgtcataagagaaatgcggaagattttttagagcgatctagaaagtcttctttttttgtcttctttttcgaatagtataagtgagaggaggaactatggttcaagaaattgcaaaaaaactgatccgtatgggaaagaaggaagaggctcaggatctttacttcattcctcggaaggaggagtaccaagtttttatgagggtgggagacgagaggcgctttgtgcagtccttcccttttgaggacatgacggctatgattagccactttaagttcgtggcagggatgaatgtgggagaaaaaaggcgcagccagctagggtcgtgtgattacccattagaggatggagtggtctcgattcgcttgtcgacggtgggagattatcgtggctatgaaagcttggtcattcggctcttgcatgatgaggaacgtgaattgcggttttggtttgatcagttgccagacttgcagaagaaattggccggtcgtggtctctatctctttgcaggtcctgttggttcgggaaagaccactctcatgcatgctttggcgcaagagcgctttgcggaccagcaagtcatgtctattgaagaccctgtcgagatcaagcaggataatatgcttcagcttcagctgaatgaccagatcggcatgacctatgacaacctgatcaaactctccttacgccatcggccggaccttctcatcattggagagatccgagataaggaaacagctcgtgcagtcgtacgagctagtttgacaggagtcaccgtcttctctactattcatgccaagagcgttcgaggtgtttatgagaggctcttagagcttggagtgagtgaggaagagctcaagattgttttacaaggtatttgctaccaacgattaattgcaggaggaggtgttgtcgattttgcgacggaaaactaccaagaacactcagccagccgctggaaccaacaaatggatctcttggctcaatcgggatatatccagctggctcaggcacaagccgaaaaaattatctacaactaaacaaaagcaaatcattgaattgtttttgaatctttattcgagtggttttcatctgtctgagattgttgattttttggatcgttcccacctagtagagagtcatttggtctcccagatgcgagcagatctctctcggggtcggagtttttcagagatgatggcggggatcggtttttcagatgcggtcacgacgcagctgtctctcgctgagctccatggaaatcttgcattgagcttggagaaaatcagtgcttacctagaaaatatgcgcaaggtcaagaaaaagttgatcgaagttagcacttatcctcttatcttacttgggtttttaattttgattatgctaggcctgcgcaattatttgctccctcaaatggatgcacaaaatattggtacgcaattgatcagttcctttccccaactctttttggcgctcgtagcggggatagtggttctcttcttattcagctttctctattatcgaaaatctagcaagatcaaagtttttagaagcttgtcccatcttcctttcgggaaaggcatgattcaagcttatttgacagcctattatgccagagaatggggcaatctgattgggcaaggattggagctgtctcagattttttccatgatgcaggaccaaaaatcccagctttttcaagaaattggaagggacttagctctttctttagaccgtggccagtccttttcagagacggtcagggggtatccttttttcaaaaaagaattgccccttatgattgaatatggtgaagtcaaatcaaagctcggaagtgaactagagatctatgctgaaaaaacatgggaagatttctttcgtcgggttcacaaggccatgaatgtgatacaacccttggtgtttgtctttgtagctcttgtgattgtcttactctatgcagccatgttgctgccgatttatcaaaatatggaggttcatttatgaaaacattaaaaacctataaggttaaggcctttacacttattgaaatgttagtggtcttattgatcatcagtgtgctcttattgctctttgtgccgaatttgaccaagcaaaaagactccgtgaaagagacaggaaatgcagcggttgtgaaggtggtcgaaagccaggctgaattgtacgagctcaatcataccaatgaccaagccactctatcaaagctgattgcggatggaaatattaccaacaaacaagcagaatcttatcgtgcctattatgcgaaaaatagtggagaaactcgtgcggttgcagattaaggccttcaccttggtggagacccttctgaccttgatgatcgtcagttttatctatctgggcttatcgggatcgatcaggacgagctttcagcaggtggaagaaaaagtattttttgcagagtttgaacacctctatcaagaaagccaaaagatagccttggcaaggcaaacggaattggatgttgaagtgactgcaaggaagattcaaacgccttaccagacggtggagattcctgattctgtcattttgcaagatcctaaaactattcgtttagaccgagcaggtggcaattcatccctggccaatgttcactttcagacacagagaggagtggtgacctatcaactgtcgcttggaaatgggaaaattaaaaaaagcatccgttcccgctagtattctcatagaatctttggtagccttgggtttatttgccatgattacgaccttattgttaggggagatccggcgttcgcgcaaggagcgactagcggatttcaaagaggtagaggtcttatctgtcgctcaaatggcgcttcagacagggcaaaatcatctagaggccaatggtattcaggttcaagtagaaaaagatgccgatcaactcacggtctatcatcaagggaaggtggtactgcatgtggaataaaggaaaggtcaaggcctttaccctgctcgaagccttggtcgctctcttggtgctcagtgggggagtgttggtctttcaaggcttgaccaagctcctgcatgctgaattggactaccaggcacatcaaaagcaggaagaatggatactttttcagcaacaattgcaggtggaattggatcggagtcattttgaaaaagtagcggacaatcatatctacttggttcaggatcaaaaaccaattgccattggtcaatcgaaaggggatgatatccgaaaaacagatgataagggcaggggctatcagcctatgatttcaggggttcactctagtcagatttggcaggagggagagtcgcttcatctgcggttgaattttgaagatggtctagaaagggagtatgtctaccatgtggtaccagcgatacaaaatgaaaaaagttaaggctggtgtcttgctttacgctctcttgatggcagcgatttttagtctcttgcttcagttttacctgcaccgtcaggttgcggaaagacgaatcttaaagacgagtcaagatcgccttcgggcctatgctttggtgcaaatggctcttgaaaagagaaagagtgatgagaagacatcagagattcatttaaagtctggaacagttcagctaaagaaggatactggttttcttcatgctcaggctaagatggatggcgaaagctatgagtttgtccttcctgtaagggaagaaaaggaaagcaagaagagtcaaaaagaaaagaagaagacgcagaaagataaggagaaggcagggagcgaaaagccttctgaagagacgccaaaagaggccaaggagccatcagaaaatagcgaaaaagactaatttttggtatgatagggtgcggaggaaatcatgaatttcgaaaaaattgaacaagcctatacctatctattagaaaacactcaaagtattcaaaatgaattgtcgaccaacttttatgacgccttgattgaacagaatgccatgtatttggatggcaagacggatctagacattgttaaaaacaatagcaaaaaattaaaagaactagatttaagtaaggaagaatggcgcagagcctaccaattcctttttatgaaagctgctcagacagagcctttacaagcgaatcaccagttcacaccagatgcgattggttttatcattacatttttgatcgatcagttagccaaagacgaccaactagatgtcttagaagtgggaagtggaaccggaaatctcgctgagaccattgtcaacaatagccgcctcacgattgattacttaggattggaagtggatgatctcttgattgacctatctgctagtatcgcagatgtgatggaatccagtgttgtctttgcacaaggcgatgcggttcgcccacaagtgttgaaagaaagtgacttgatcgttagcgacttaccgattggctattatccagatgatgcgattgcacagcgctatcaggtggcgagctccgaaggccatacctatgcccatcacctcatgatggaacaggctctgaaatatctgaaacctcaaggagttgccatctttttagctccaaataatctcttgacaagccctcagagtgatctgttgaaagcttggctaacagacaaagcccaaatccttgccatgctgaccttgccagaatctcttttttcaaatccagcctatgctaagacgattttcgtcctacgaaaacaagaagaagagtctgttcagccctttgtctatccgtttaccgatctccaggatcaagaccaggtggttcactttatggaaagtttccaaaactggttaaaggatagtgaaatttgatcaaagatctgatataatagaggatgtgaaaacgcttaatgaggtgaatatatgtcgaaaacaatttctattaatgcaggaagctctagtttgaaatggcaattgtaccaaatgccagaggaaactgttcttgcaaaagggttgattgaacggatcggtttgaaggattctatttcaactgttaaatttgatggacgctctgaaaaacaagtattagatatccaggaccatacacaagctgtaaaaattttgttggatgatttgattcgctttgatattatcaaatcctacgatgagattacaggtgtgggtcaccgcgtcgttgctggtggagaatacttcaaggattctgccttggtagatgacgaagtccttcgaaaagtagaagaattgtctttgttagcacctcttcataatcctgcaaatgcagctggaattcgtgcctttagagagatttgtccaaatattaccagtgttgtggtatttgatacttctttccatacaaccatgccggaaaaagcttatcgttaccctcttccaactaaatattacacagaaaataaggttcgtaaatatggcgctcatggaaccagtcatcagtatgtagctggtgaagctgctaaacttcttggaaaaccattagaagaattgaaattgatcacttgccacgttggaaatggtgtatctgttacagcggttgacaagggaatctctgtcgatacctcaatgggcttcacccctctaggtggtgtcatgatgggaacccgtacaggggatcttgatccagcgattattccttacttgatggaacatacagaggatttcagtaagcctgaagatattagccgcatcctcaatcgtgaatccggtcttctgggtgtttctggatcttctagtgacatgcgggatattcatacagcgatgcataatggagacgaaaaagctaaattggcttacgatatctttatcgatcgtttgcaaaaatacatcggtcaatacttagcagtcttgaatggtgcagatgccatcatctttacagcaggaattggtgaaaatgcagtaaatgttcgctcttctattatcaatggaatcagctggtttggctgcaaggtcgaccctgaaaagaacgtctttggagttgtcggagatatttccacagatgattcccgtgtgaaggtattggtgattccaactgatgaagagttggtgattgcgcgtgacgttgaacgtttcaaaaatcagtaaactgaaataaagtgagaaggctggaggcgaaagccccagtcttcttattttatacaagaaagaggttgtccattgaaaaatatacagtcttttattcgagagcacccattatgtaagaatgccctctggctcctgctttttgtgcccttattctttctctcgcaattccccctcatcaccatggtttattcccttcaagaaggagtagatgcaaggtgggtcactatcctcactctcttggtaacagtggcggtgctctttgttttttataaggtcatcaagatgagccctctggagaacttagatgttcgggtcattacctggccggctctggggagaaatttcctttttcttctcttgttgatggctaataacctgctcgcttatcccttgttgaaacaagaggcaggtggtacgacggcaaaccaagcggctctaaatgaactacaatctcatgctccttttcttgctatgggaatggtcgtgatccttgtcgctccgattctagaagagctgctttgtcgggccattatccctcgtttgatctttcgaggggcagaaccaatcggttatctagccggtgctctcttttttacttacttgcatggaccgagtaccctaggggaatgggtagcttacggaggcatgtccttgatcttaacttgggtggcttatcgctacaagcggatcgagtatagcatttgccttcacatgaccttgaatgcgctggcttattattatccggtggtcatactcctttgtttattgccagtatggagagttttcttccatgataaattatgataaaatggtaggtaccaatgagttttgatgcagaaccatcctacagaaggtcagaaatccgtatggagagtagactcagaggtttagaacacttgttctagcctcttttgttcgcaatcatgctgtaggaaggaaatcaaaggagaacgaaaatgattgataataaatggctgagtggccaagggacccttctttgtgggatcttaaatgtcactccggattcattttctgatggcggtaagtatacgagtgtggatgcagccttgcaacaggcgagaaaactgatccaagaaggagctcagatcctcgatatcggaggagaatcaacaagaccaggtagtcattatgtagagatccaagaagagattgaccgcgtggttccagtaattaaagccattcggaaagaaagtgatgtcttgatctcagtggatacctggaagtcccaggtggcggcggcggcgctcgaagctggggctgatattgtcaacgatattacgggttttcttggagatcctaagatggctgctgtcgtcgcggagcatgaagcgagcgcagttctcatgtttaatccagtgatggcaagaccgcatcatccaagttccactatctttccaagttttggtttcgaaccagtcttttcagagcaagagcttcaacagatggctcaagaaccgattcaagacgtgatgtggaccttctttgaccgctcgcttgcggtagcgaaagcagccggtgtccagacggatcgtattatgttggatcctgggattggttttggtttgaccaagcgtgagaacttactcttattacaagaactcgggacgattcaccaaaaggggtatccgatctttctaggggtctcccgcaaacgatttgtggtcaatattattgaggaagctggatttgagacagatcctgcaacggagactggtttttggaatcgggacctggcttcgagccatttgaccagtattgcagccagtcaaggagtcgaagtggtgcgggtgcatgatattccccttcacaagatggcagccagtctgggccaagccattttccaagcccaagaggcagcagataccaatttaaaacaatacaagtaaatgaagacaaaagaacatcagttggatcttcgttggctagaagcctatcgttcccaagatccacatttcggtttggatcgcatggaagctctcttggctttgagaggaaatcctcacctagactgtcgggtcatccatattgcggggaccaatggcaaaggctctaccattgccaccttgtcccaactcttgaggcaggcaggtttacgagttggagtctttacctctccttatctgatccattacaatgaccaaatcaccattaatggcgaagccatttcggatcaagacctgcaaacctacctggatagttaccagcaactcctggaagctgaacaatcaagggctgtttttcaagggttgacggaatttgaagtgatgacggccatcgcctatgattattttgctcacgaggagctggattatgtgatcatggaagtcggtatggggggacgactagacagtaccaatgtctgtcagcctgttctgacggcgatcacttcgattggcttggatcatgtcgcccttcttgggccagatctggcttccatcgcccgtgaaaaggcaggcatcattaagccaggaattcctctggttctagggaaattagaagcagaagccagccaagtcattgaaggcattgcgattcagaagcaggcaccgataacagcctatgacagagattaccaagttgagctagaggcctcttgtctatcgggccaatccttttcttatcacagttccaaaagagaaacagcctcctatcaagtagcgctcttaggtcatcaccaggctagaaatgcagctcttgcgatcagtatctgtgatgtactttttgaaagagaagggcgtgaactcttgtcaagagagttagtggatgaggccttgcatcaagtcgtctggcctggccggatggaagtggtctcgcaaaatcccatgatcttactagatggggcccataacccccatgccgttgcgcctttgatcgcaagtcttcgggaactgttcccaagtcaaaataagaccattctttttacctgcatccggaccaaagccttagaagagatgctcattcagtggcaggaactagaaaatagtcgcttgatcctcacgagctttgaagatccaagagcttattctcaagaagagataagagctgctgcgaaaaaccatcagcttgaggaagtcaactggcaagagtttctacaaaactggcaagctgaaggcaatgagctcctcattgtaacggggtcgctctacttccttagccaggtacgaccttatttattaaaaacagaaaaatccaactaggagatgatatggatacaaagaaaattgaagaagcagtaaaaatgatcatcgaggcagtcggtgaagatgagaaccgtgagggacttcaggaaacgccgacccgcattgcaaagatgtaccaagaaatcttttcaggactagggcagacagcagaagagcacctgtctaaatcatttgaaatcattgataacaatatggtggttgagaaggatattttcttccattccatgtgtgagcatcactttttgccgttttatggaaaagtgcacattgcctacattccaaatggccgtgttgctgggctttcaaaactggctcgtacggtcgaagtttatgctaaaaaaccacagattcaggaacgtttgacggtagaaatcgcagatgccttgatggaatatcttggagcgcaaggtgcccttgtctgggtagaagcagaacatatgtgtatgaacatgcggggtgtccgtaaacctgggactgctacagtgacaactgctgcgcgtggattgcttgcgacagataaagacttgaaaaatgaagcctataaactcatgggccactaatggctggctataagaggtgaagagagtggatcaattacggatcaaggacttagaggtatacgcctatcatggtgtttttccagcagaaaaagaattaggacaacgctttgtcctagacctatgggtagattatgagatgacccgtgctgcccgcacaggagatttggatgcttcgatccattacgggatcttggcggaacagttgaccgagtggatgcaggcagaaaagatcgatctgattgaaacggttgcctttcaattggtgcaaaagattttcgaaagttatgcctttgtagaaaaagttcgtctggagttgaaaaaaccttgggctcctgttcccttgccactcgagacttgttcggtgacaatcgagcgagagaaaaaacgagcctttattggccttggtaccaatatgggagataaacaactgcagctagagacggcgctagaaaaaatcaaggatcgaggcattcaccttcttcaaacgtccacaaggattgaaacggaaccttggggaggagtggagcaggatacctttttgaatcaagtggcagaggttgaaacctggatgaccccagaggatttactagaaaccttacttgccattgagcaagaaatggggcgtgtccgtgagatcaagtgggggccacgtgtgatcgatctagatctgctctatatggaggacaccatttattacagtcctagcttgatcttgccgcatccgtatgtggcagaacgtgcctttgtattagaatctttaaatgaaattgctcctcattttgtggaccctgttcaaagaaagcccattcgccaattatgggatgccgtcaaataatctctcttctttgcttcataaaaaaacaatccctcgagcagggattgtttttgtttgtcttgctttatttacgatacaagcgatcgtactggtagacagggtccatggtgacgttgataccgagcttgcgaaggacgttcttgtcttcgtctgtcagcataacggttgaatgggcttcgctgcctttcaacttgcctaattcttgcatagcaagcttagcgtcttcgttgctcatagccgtaatggcaagggcaatgaggatctcgttcgagtgaagacgagggttgcgactacccaaatgattgatcttcaggccttggataggttggacgtattctggctcgattaatttggtttctttatcaatatgcgccaatttcttgatcgcattgatcaagagggctgcggttgggccaaagagatcagacgtttttccggttaccatctcgccgtttggcaattcaagcgccaaggcgggctcccctgtttcttcttctttttggcgggcaaggacggtcactttccgatcatttggagtaatccccaaatcattcatcaagagctcaattttcttcacagctccttcaccgacacgctctgctttgacatctaagatggtttggtagtagcgacggataatttcttgttgggaagcttcaatcgctgcgtcattgtccacaatggcaaagccaaccatattgacgcccatgtctgttggagaagcataaggtgaggttcctaggatgcgttccaacatgcgcttcaagacagggaagatttcaatatcgcggttgtagttgactgttgtttcgccgtaggtttggaggtggaagggatcgatcatattgacatcgtctagatctgcagtcgctgcttcataagccaagttgactgggtggtgcaaaggaagattccatactgggaaggtttcaaacttggcataacctgatttgatcccatttaattggtcatggtacatattggacatacaagttgccagcttaccagaaccaggtccaggagctgtcacaacgaccaaattgcggctagttttgatgtagtcatttttccccatcccttcaggagagatgatgtggtccatatcggtcggatagcccttgatcggatagtggagataagaggcgatcccgctcttgtccagttgtttgcgaaaggcatctgctgcagcttgtccagcatattgggtgatgacgacagagcctacaaagatccccaattcattgaatttgtcgatcaagcgtagcacttcttggtcataagaaattcctagatccccacgggcttttgagtgctcaatgttgttggcgttgatggcaatgacaatttccacctggtcgcgcaattcttggagcaacttgatcttattgtctggttcgtatccagggaggacacgagcagcgtggaagtcttctaacatcttaccaccaaattcaaggtagagcttgccatcgaattggttgatccgctcaataatgtggtcacgttgcaagttcaaatacttttcagaactaaaagcttgttttttcatgtaaaactcctgtatataagggaagggtctgcctcacaaatccaaggatgagtgttccgttccctaccatttcattctttcatattatatcagaaaacagatggaagataaaatattctaagatactttcctaagatgaggttagacatcatagaatttgattgttcaggcatattttttacataaaataacctaagtgatgctaaacaaataaaatgaggtagtctattaaggttatcgcagtgtgcacttaaactttccgctgtgagaaaagtgctagaaacaaacttgtttctagcacttgggagttttggacctaaggaaagtttttaagaggattttatcctctatctgaaagctccttacggggcttcagaaaggatttgcttaatagtgtttgatcagatcaactgtagaacgatccaatttcttaaccaatgcttgcaagaaggcttgcgcttgcaagaaatcatccatggcatagagggtttggtgagagtggatgtaacgtgcacagacaccaatagtggttgatgggaccccgccgttcttcaagtgtgctgcacctgcatcggtaccacctttggcacaatagtattggaatttgatgcccgcttcttcagcagtagtgagcaagaaatctttcatatttggtagcatgatgtgacctggatcgtagaagcgaagcagtgttccttccccaatcgcaccttggtctccaaagacatcagctgctggcgaacagtctacagcaaggaagatttcaggatcaaatttagtggttgaagtgtgagctccacgaagtcccacttcttcttgaacgttggcccctacgtacagttcattgtttaaggcttgtccagaaaggttcttggccaattcgctgaccatcaagacgccatagcggttatcccatgcttttgagatgacgtttttaccattagcagtgagaatcgcagagctatctgggaccaaggtatctccaggacggactccatagctttcagcttcggctttagagctaaagcctgcatcaaagacgatgtcgctaatggcaggtacggttggtccacctgttccacgtgtcaaatgaggaggaacagatcctgaaatagcagggtattcacgtccgtcacgtgtaaagagtttgaagcgttggctgctgacgaccatcggattccaacctccgattgggacaacgcggaaagttccgtcagctttgatttcgctaatcataaaaccaacttcatccatgtgagcagctactaagatacgaggagcatcggctgctgttgagtgtttgaccccaaagatcccaccgagaccatctgtcacgatttcgtccacatgaggggtcaattgttggcgcaaataatcccgtacaggagcttcatgacctgagatagcagggatttcagttacttctttgattttagaaaataaatcagtcataggttaccttctttctgatgctattttatcactttttctacaaggatggtagcgttattatggaaatcagactctaaaatcggagggagagatccagcttagaccgttgtccctctgcttattttgtgttacaataggcactatgaaagctaaaaaaattattttgtctagtctggctgtagcaagtgcaggagctcttgcggccggtgtctataaaattgccaaagatcaaaagcgtctccgtacccaagaagagttggtagcagaagtacgggagcaaatggaagccatggggacgattgcgactctgtatgtggaactctacgagtctagtgaagagcgcttagtaggtggtgtcatttttgaagatgagcgccattaccgctttgtctatgaggatggtctcttgcattacgaagaggaaaaactatgattacaccaaattctctagaagaaattgcttcttatatagagcaagaggacaagaaagtgtttgtcttttcagcagattggtgtggagattgtcgttacctcaagccttttttgccggagattgaagctgaaaatcccgaatttacctttatcttgattgaccgcgatgcctatatggatctggcgaaagtctgggatgtttatgggatcccaagtttggtggttctggaaaagaataaggaaatcggtcggtttgtcaatcgggatcggaaaaccaaagcgcagattacagcattcttagcaggattaaaataggagaaaaacatgattgtaacatacaacaaagaacaagtcggcgatgtcttgatgctgaccttgaaaaatagtggagaagcaaagctcgcggtggagagaaaaggaaaagtggctcgcgtttaccgtgaggacaaccaagaaaccgttgcctggaatatctttgatgcctcatctttcttcgccatcgaaggcaagggccaagtctttttgacagatgagcaagtggctcgtttgaaccaagaattggaaagagaaggcttcgaagaacgattggtcaacgatcgggaaccaaaatttgtggtcggagaaatccttgaaatggtggcccatccagatagtgaccacttgaatatctgccaagtagcagttggaccagataagacggttcagatcgtagcaggggctccaaatgcgcgagtgggtctaaagactattgttgctcttccaggtgccatgatgccggatggtagcttgattttcccaggggcccttcgtggagaaaaaagctatggcatgatgtgcagtccgcgcgaattgcacttgccaaatgctcctcaaaaacgaggcattattgaattggatgacgcagaagtagcagggacaccttttgatcctgctcgtcactggcacgaataaagagaagaatctaggatgttttgaatcctagattttttgattttactttgtcacctccattttttaaaattttttcgaataaatagataggaggtaaatgatgtataataaagttattttaatcggtcgcttagtagcggctccagaattgcataaaaccagcacagacaaatccgttgcccgagtgaccgttgcggtcaatcgtcgctacaaggaccaaaacggggagcgagagactgattttgtcaatgtcgttgtctgggggaaattggctgaaaccatggctagttatgctagcaaagggagcctgatctctttggatggagagattcggacgcgccgctacgagaaaaatggggtcatgcagtatgtgacagaggtcctctgccaaagttttcagttgctagagagccgcgctcagcgagcgatgcgtgaaaatggtggaacgggagatttagccgatatcatcttagaagaggaagatcttcctttttagaaataaaaaaagaaagctggttcgtttatagaccagctttttgatacttggtaggggtttcattcggggactactcttttaaaaataaagcaaaaagatgcatctgtacaataaaagccagcatttatcttgaaaaagtagtaaaataaagtaatatatattcaaaattttcagaaaaggaacggagtttgaaggggaaagaagaaagaaaagaacggttgaaatggctgataaaacgggttctactggtgattccagtggcctgcctcctcttgtggatctatgctgtttgtcaaaccagtagcatcaaggatcagaccaagattggtgtcacctatatgaccatgaacaatgagttctataaaagtattcattcggaaattagtcggattgccgatgagaaaggagctcttgtatctgtccgagatccagaattggacgaaaaaaggcagagccagcagatcgatgatttttgtgcccaaaaagtaaatgtgattgtgattaatccggtcaaaggggatagtcagcccattttaagggctcttaaaaaagctagaaaacaaggaattaagatcattgcagttgatacccagctcaagcattttaagccggatgccagcattgtctccgacaactaccaagcaggagtcttgattgcgaaagagttgatgaaacgctcttcaaatgctcggatccttctcttggagcataaggggactgtttcagcagatacgcggattcagggatttaaggataccatcaaaggacatgggtcatatgagattatctcggaactagaaaccaagggtcagacggagatcgccatgccagctgtccgtaagttcttgcagtcaggggggaatgtcgatacactagttgccctaaatgaccgctcggctataggagctttagcagcgatcaaggagcaaggaatcactcatcccattgcgatttatgggatcgatggctcaccagatatgaaagccttgctgcactcgacagatgatgttgtaggaaccgttgcccagtctccgttgaagatgggagaccgcgtgatggaggtcatccaagatatgacggctgggaaaagctaccaaaaagagataaccattccggtgcaaatgatgacaaaggaaaacatcgatcactttgatgtgaatgggtggcagtaatgagaaaatttagaggtgtgagatacagtttggccatcctgatggtcgtgaattttatcgctgtgatgctcaacagtatcatctatcttcaagcaaccaactatattattgcccaacggcaagcttccctattagtagaacgcttagagcgtattccttttgcgccctctacaactttttggttgtctgcgctcttatttgctgggattgccttgatctccatgagtcgttatcggtctcaaacgagtcgatggtccatttttgataagtggaacattctggagatcctcctgatgttgctcttgatgtgggtccaaaatgtagcttataacgggctcattctcttggtttttgcggatatcttctatggttccaaagagttgaataccaagcgagaccgcaagtattggtttgcttttatcctagtaagtttcttgatgcttcttgtgaccaattcagacgtcttttcgcttttctttccgattccttctctggatgtctatattcatttttatcctgcctccattcggattctggcctttttcttgaagaattccctctatgccttgaatatggtgctcttcattatttcgcttttgttctatattatgaatgttcttgcggaaaaccacgaagtggaagaagagttggccatggtttcgaaggtcaatacggagttgaacaactatatggccttgtctgagaagattgcagaagatcgggagcgcaagcggattgctcgggagattcacgataccttgggacacgcgctaacagggatctcggcaggcttagatgctgtcggagtcttgattgatatcgatcccaatcgggcaaaagagcaggtaaaaagcgtatcagaagttgtccgggaaggaatccaggatgtgagagggtctctcaaccgcctccgtccaggtgcccttgagggacgaaccctcaaagatgctttagaaaagatgatccgcgagtaccagacgctttccaacttgcaggttgatttacactatgaatgggtcgatgtcgatatggacgtcatgattgaagatacgatctttcgtgtgatccaagagtctatgaccaatgcggttcgccacggtcatgccagtcagatgagccttcatttttttgaggatgaagaagattacctgatcgagttgcaggacaatggggttgggtttgaaaccttgacttatggctatggactcaaacagatgatggaacgaatttctatcctaggaggacagcttcaatttgaaagccgcgatggatttttcacgcgcgtcagtttaccgaaatataaagaagggagataagagatggtaataaaagtaatggtggcagatgaccaggccttgattcgagaatctctgaaaattattttgtcagcccaccccgatatcgaagtggtggccacagtggaagacggcaatcacgtcctgtctagcattccccaaacccatcctgacctaatcttgatggatatccggatgccagggatggatggggttttggcgacaaaagaagtaaaagaacactatccggatatcaaaattattattttaacgacctttgacgatgatgaatttatctacagtgcgctcaagtatggtgcttcaggttatcttttaaagggagcctcgacagaggaactctatgaagcgattaaggtggtgtatcagggcggagccatgatcaacccgaatatcgctagtaaagtctttcaaattttctcacaaatggctaaatccaacttctctattgctgtggatgaggacaatgtcaaggatttgagcacaacagaatggcgcattatccaagaagttggctatggggagtccaataaagaaattgcggccaaactcttcttgtcagaaggaaccgtgcgcaattacttatcaacgattttggcgaaattaaacctaagagatcgaacgcaattagcgatctggtcagtccaaacaggagtgacgagacgtgatttttctaaaggaaatacagaatgaaattgaagcgaaagcatctttgttgggggattggtctccttgttgtgctctgtgcgagcgcgggtttttattggtggaaacagcaaccgaccgtactccatatcggcgtttatgcaggttctagctgggatgtgccgaccagtcaacgttcccatgccttggatcgtgcgattcaaaaatttgaaaaatcccatccccacgttcgtgtagagtatgaaaacgggattccgcagtcagattattcagactggctctctgaaaagattgtctcaggaaagacgccagatgtgtttatggtctctgagcaagatctttccttattagcagcgcgaggcgtgctagaaaagttaaacggctatatggatcgaaaagatcaagctgccttttatcccgttgcctttgaatccggtgtctatcaggggcaaacctatgccttaccttatgaaagcaatccgattttgatgtgtgtcaataaagatctcttggataaagaaggcatcgcggttcccaaagaaggttggtcccttgaagagttctatacgatttgcaagaaactaaccaaagataccaatggggatgggcaactggaccaatttgggagtacagaatacacctggaaagaagccttggcggcaaatggaggtcatctcttccaaggtggcatgctcaagctgacagctccagaggtgaaagagtctctgacttttctgcaaaaattggaagatctaaataaaaattacaaggtgagctctaaagattttgaccaggggaaagtcgccttctatcccatgaccttggctcaatatcggacctataaaccttatccctaccacgtttctaaatattcaaacttcacctggacctgtatcccgatgccggctaaatcaaaaacgaccaaggcaaccttagtcacgacgacttcttttgctatgtcggctcgaagttctcattccaagttggcttgggaattgatgcaactcttaacagaggatccagacattcaacaaaccctctttgctcaatcccaggggatctctgtcatgccacaggtggtcaagagtcgctctagtaaagaccttttgcaggtagatgattttgggacggattccttgaccaatcagaccttgaaccgcattatggaacaagctgttgaaagtagtccgaaaaatgtctcaaaagaggtgctagaaaagctagactacttaattggcaatgccttgcgcgatcaagatgtcgagaaccgcttgcctcaaattcagagggagattgaaagtagcctacaggtaggagtttagagtaaaataagatggcattttgtcaagtgacagatgtcatttttttattgctaaatgtcatattgggaatgtgacatttgacaatataaaaacgctttcaaataatctacaatagagtcaaataaaggaggcgtagaaaaatgaaatacctcgttttggtcagtcatggtggactggcagaaggtctaaaaacatcactagccatgtttgctggtgataagatggatcaggtcatcgcagttggactcaaagaaggaaaatcagttgatgacttcgcagttgatttcagagagagcatttcaggattgacagctgatgattctgttttggtcttggcagatatcgtaggtggtagtccattaaccactgcagccacggttctagaagaagctggaaagctcgatggagccttaatccttggtgggatgaacctcaccatggccttgacggcagttgtgatgaaggatgtgttggatggagaagatttgtcagccaccatcttatcagaagcacgatctgcactacagccttttgaagtttcagccacaagtgctgaagaagatgatgacgatatttaatagggaggtaccttatggtagtaacatttgtacggattgatgaccgcatgattcacggtcagacagtcacacgctgggcaaaggaaaaaccatgtgatggtttgattgccgtaaacgatgcagcagcatcaaacaaggttttgatccaagcttacaaaggcgcatcagacaagaaaacctttgtatggacaaaggaagcctttaaggaaaaatcagcaaaagtaacagaatcagatagtcgttacttcttgatcaccaaaaatccaatcgatatgaaggaaattttggtcgaccaagggtttgtcccaggtgatgtcaaagaaatcattgttggccctgcaaatgatcgtcctggagctgtgaaattgggaaataaccaatctatcactcaggaagaagcagaagccttccaagccattcaagcagcaggctacaaggtgaaattccaattgttgccagatgtttccatcggttattgggatgatttcaaatcaaaatttggtttttaaaactaacagtctcatctgttaggtaaataaatttacaaacaaaaggagcgtttgttatgacaatttcatggattcaagcaatcttgcttggtattttcgccagcttgtcttcaatgcctggtatgggaggttccagtatcgggaactatacactcggtcgtcctttgatcggtgggttgatttcaggtttaattcttggagatgtgacaactggtattatggtcggggttgcccttcaagtcgtttatatcgccttggtaacacctggtggtaccgtatctgccgatgtgcgtgccatctcttatatcggtgttcctcttgctatcttgtttgtgcatgccaataacatcacagatgaagcaggaatcgccgcagctgcagctccaatcggtgcagccgttgggacaatcggtacagttcttttctacggtaccgctactatgaacttggtatggcaacacatcggttggaaagccgttgaagaaggaaacttcaaaaaactctacgcagttgactgggtttacccttggatctctcacttcctcttctctttccttccaacaatgattatcaccaaatacggtgaaaacatggttgatttgatgaaacaataccttcctatggatggttactggatgaaagccctctttacagtcggtgctcttctcccatgtgtcggtattgccatcttgttgaaacaaattgttacagaagcaactgacttcattccattctttgttggatttaccttggcaaaatctctcggattgaacttggtatccagtgctgttgtttcattaatctttgcagtaatctactatgaacttgaagtgatcaaatcgatgaaagctgctccggctggagcggtggatctagacgatgatgaggaggatatttaaaatggctgatagaaagaaaatttcaaagaaaacattagcaaaagcattccatcattggtattatggtcatttgacttgtttctctcaagaacatatgcaaaccttcgggtacttgacttctatgcttccaatcgtagaagaaatgtatgacacaaaagaggaacaaaaggatgctatgcaaacctatacggccttcttcaacactgaaccacaacttggatctcttgttgtagggatcacagctggtttggaagaagcgcgtgcaaacggagatgcagtagatggcgaaaccatcaacggtatgcgtgccggtttgatgggaccaatcgctggtattggtgactcattggtcgttggtaccttgattccagttctcttggggattgcccttggactttctaaaggtggtaacgtcgctggtgctctcttctacatcgtcgtatggaacctcttagtctactttggtatgcgctttgccttcttcaaaggttaccaattaggggataaagccgttgaattccttgtaggaccaaaaggacaagctcttcgtaaagcgatcagcgttgtcggtggtatggttatcggtgccgtagcagctacttgggtatctgttacaacagcccttcaattcaagaattctgaaggaaaagtcttcttgaacatccaagaaaagatcgatggtgtttatccaggtctcttgacagcagccttcattactctttgctggtggttgatgtctaagaaaaaaatttcaccaaacaaagttatgttacttctcgttgtagtggctttgatcggtgttgcccttggtatctttgacccacatcttaaatactaaggaaaagaaaaaacgaatttgctagtaggagtttttgagaatgaagtgaattgacctcctttacttgcacttcattctcaatttttatcaggaggaatcccatggttacaaaacaagaacttgtcaatggatatgaaacagaaatcaactaccaacgccacatgcttgaaaaccttggtcgttggttcagcttactctttatcattgccagtattggtgtggtattgatctatctctttcacaaaagtttccttccactcttgatcctcgggattttactagccttggttggaattttaggcatgattgtttttggatatggcatctaccgcgggcggatcaatcttcaaaaagtgatcgatgatttcaatcaaaaattgacaattttaaattgatattttagaaacatctcatttatttttgaggtgtttttttcttgactatttttgaccaagtgatacaatagaaacataagttagcacttacgtatagagagtgctaaaaacacgtatggaggaatgaacatgttaaaaccattaggagaccgtgtggtcttaaaattcgaagaaaaagaacagactgttggaggttttgtcctcgcaggtgcgagcaaggctgatacaaaaacagctgaagtagtggccgttggtgaaggtgtgcgtaccctaagtggtgaactcatcgctccagctgtaaaagcaggagaccatgttttggttgaaagccatgcaggaattgaagtgaaagatggggaagaaacctacaccatcgttggaacagcgaacattcttgcaattgtagagtaagagaagaaagaggtaagagaaatggcaaaagatattaaattttcatctgatgcacgttctgcaatggtccgtggtgtcgatgtcttagcagatacagtgaaagttacgttgggccctaaaggtcgcaatgtggttcttgaaaaatcatttggttcacctttgatcacaaatgatggggtgaccatcgcaaaagaaatcgaattggaagaccattttgaaaatatgggtgccaaattggtgtcagaagtggcttctaagaccaatgatatcgcaggtgacggtacaacgaccgcaacggtcttgactcaggccatcgtccgtgaagggatcaaaaacgtcactgcaggagctaacccaattggcattcgtcgtgggattgagaccgctgttgcaacagcagtagaagctttgaaaaacaatgcgatcccagtatcgagcaaggaagccattgctcaagtagctgctgtgtcttctcgttctgaaaaagtcggtgagtacatctctgaagccatggaaaaagttggcaaagatggggtcatcaccattgaagagtctcgtggaatggaaacagaactggaagtcgttgaaggtatgcagtttgaccgtggttacctctcacaatacatggtcacagataatgaaaaaatggtggcagaccttgaaaatccatacattttgatcactgataagaagatttcaaatatccaagaaatcttgccattgttggaaagcattcttcaaagcaaccgtccactcttgatcatcgcagatgatgtcgatggcgaagctcttccaacacttgtcttgaacaagatccgcggtacctttaatgtcgtagctgtcaaggcaccaggatttggtgatcgccgcaaagccatgctagaagacattgccatcttgactggtggtacagtcattacagacgatcttggtttggaattgaaagatgcaaccattgaagcacttggtcaagcagctaaagtgtcagtcgataaagacagtactgtcattgtcgaaggttctggtaacccagaagcgatcgctaaccgtgttgcggttatcaagtcacaaatcgaaaccacaacctctgaatttgaccgtgaaaaattacaagaacgtttggctaaattgtctggtggtgttgccgtaatcaaggtcggtgctgcaacagaaacagaattgaaagaaatgaaactccgtatcgaagatgcccttaatgcgactcgcgcagccgttgaagaagggatcgttgccggaggtggtacagctcttgtcaatgtcatctctgcagtcgcagcccttgaattagaaggagatgaagcgaccggacgcaatatcgttcttcgtgccttggaagagccggtgcgccaaattgcccacaatgccggttacgaaggatctattgtgattgatcgcttgaaaaatgccgaagtcggaacaggtttcaatgctgcaacaggtgaatgggtgaatatgattgatgcaggaatcatcgacccagtgaaggtgagccgttcagcccttcaaaacgccgcttccgtagcgagtctgatcttgacgaccgaagcagtcgtagccaacaaaccagaaccagcagccccagcaggaccaggaatggatccaagcatgatgggtgggatgatgtaacctgataccaatgattggtgctaaagcaccgaatcattggacggtagccgctatgttgcggcctacctaatcatcttactagctcaaagggaggaaaatatcgttcctcccttttcacgtcgtaaccccttggttaatttatcaggtgcatttattgttatggcaagcaccatggtgccttgccgaagtgtcttactagctcaaagggaggaaagtatcgttcctccctttttcgcgtcgtaaccgctacaaatgattgaggctatgactctcatcatttgacgccagccgctattgtgcggtctggctaatcgtcttactagctcaaagagagtgggacataaatcggtaattcgttagaattcgatttcgtcgtcccacctccgcacagttgagtagggctgtaaaaactgataaaatcagcgtagtagagcccactcaaccactgcgtcttgctcgacaattcaaaaataattgagaggctaggacttttgtcccagcctctttttatcgtgctttggaattttcatgtgttgtggaataatatttttattttaaattttgtaacagaaatgataaatactaattaaagaggacttgcgtagatgcttgggaatccggtatttgcggggttttcgggcggaggaatatttgccaacaaattgcaatacaaattaactgattttgtaataattctagtgtatactagtaagagtagatcacaggtctacattgttgcaaggggagaacttcccacatacatgtctattgacaataaaacttgatcgtaatatcgctgctagtaaaatgagagtttgaacatagcgtagattttatcgacctttttcatattaaaaaatatttttcaaattccccttgcgcaagctcttccggattcctccgggagagtttttttgttaagaaaaaaagtagaaggcctttgagtctcctttgaaagagtggcttagcaggcatcatttatggtaaaatagaacatattcgtagaggggaaggagtgaggactttgttgaagatttttgtgttagaagatgaatggatccaacaatcgcgtatcgaagcggtcttgcaggatctcatctgtcaaaaatccttgcaatgcaaagcgccagaagtgtttgggaagtcaagtcagttgctggatgctatcacagagagaggcgcccatcacctattctttttagatatcgagattaaaggtgaggagaaaaaaggactggagatcgcaaaagagattcgtaagaaagatccccatgcgaccattgtctttgtcaccactcactctgaattcatgcccattacctttcagtacaaagtagctgccttggattttatcgataaaacgctgggtgaggaagagttcaaagagagaatcagctcagccatcgattataccttggagcaagctgggaccacgattgcgcaagatgcctttacgtttgagagtgcgatggcgcgtgtacaagttccttttaataagattttgtatgttgaaacgtctccaaccattcacaaggtcattttacacacccaggaagagcgcttggaattttacgctagtattaccgatatcgaaaaagcagatccccgcttgtatcggtgccaccgctcctttgtggtgaatccgcaaaatattacgaagattgataaagaagccaagaaagctttttttgaaaatggagacaattgcttgatctcacggaccaagtatagaggcttactggaagctttgaaaaaatagagggagaaagaattgctgttaactattctaatgtcttacctaaagttcttcgtcagcatgctgatctatcgtcatatcagtagacaagagttcaccttgtgctggctctttttgtgccccttcttctttgcaattatctttacccttgtgccaccggtaggcttttttggctatttcttagtatttattgcctatagtttctaccgaaatcgtaacatacgacaccttttgaatattttttacgggctctacccggttgtcatggagagtctcattgcgcgtctcttagccttttatgtctttccaatgttagggatcgtacttgttcatgaggcatctgtcagctggtatgatgctctacttgaattgctggtctttcctgtttatataggaatcactaaattgttaaaactagattttacagatttaaaagtagggtttcaacggcagtattttaatcgtttcttactcccgatggatctttccatgtttgtgtatttagtcagtgttgtaggtctggtggtttttgaggatgctattcctcatgcagatgctttacgggaacagttaaatagtatttatttgattttgttttttgtgatgctcttgtatttcaatgcggtatccaaagaacgattgaaacaagaaattctggaacaaaaagataggcaactgcaggagttagccacctatagccaacacgtcgaaatgctctatggggagattcgtgcctttcgtcatgattacctgaatattttaaccagtctcaaattaagtattgagcacgaagacctcaatgcgatcagggaagtctatgagaatgttcttcgagagagtggccagcaattttacaatagtaagtttgatattgccaaactcagtcacatcgaaaatccagctgtaaaaagtgttctgtccgcaaaattattggaagctcaaaataaagggattgggatctctgtcgagatcgatgaaccagttcgtgatttattcatcgaggttttagatttcatcaccttcttatccatcctttgtgacaatgctatcgaagcgagtctcgaatcagaggacccacagctgactcttgccatgcttcaggatacgaactccctcatcttaatagttgaaaatagtacaaaagctgaaaaaatagagttagcgagaatttttgaaaaagactactcgagtaaaggagagggccgcggtcttggcttgtacaagatccaacaattactggaaaagtatcccaaaacgacagtgtctaccaagagttcaaactaccgatttactcagagcctgaccttttggaaggaataatggaatagagagtgggacagaaatcggtcattcgttagaattcgatttcgtcgtcccacctccgcacagttgagtagggctgtaaaagctaatgaaatcagcgtagtagagcccactcaaccactgcgtcttgctcgacaatcaaaaataattgagaggctaggacttttgtcccagcctcttttttgaccattcacgacgattttctgaccgattctgacagagagctacaaagactgtccctttgaagtatactgtatacaagatcaataagaaaagagggatcgtatgtttcaggtagcatctattacaaaatcatttaaggagaaagctgtattaaagggagtgtctttttcgatagaagaaggagacaaaattgccttgctgggaaataatggggcaggtaaaagcaccctgttcaatattatcgctggacagctccaggccgattcggggacgataaagacttcgcttgattttcaaagagaaattgggatgatgcctcagggggatctgctcatcgaggatctaacccttgctgaattcgtcgaattaaaaagccggatgaatcagctgaagcaggctgatatcaatggactcttagaaatggtcgaattaagagaatcaagagagcagatggtgggaagtctttccggtggtcaaaagagacgcttgtccttgttgttaactattttgaatcatccaaagttgatttttttagatgagccaacgactggcatggacttggaagcagtggataacttttggaaactactggagcagcaagagtttacatctgttgtggtgacccatgatttcaaccaaattgatgccttttttacaaaagttttgattttaaaagatggtcgaattgctgccgcaaaagctgttgaggacattcaccaggctggtcaaaccattgagcagtatttccgagaagagatgaataaaggaggggaacaagcatgagaaagattcaattaaaacaagttttacgaaataagcgctttgtattattcaccattattttacccataggctggtatatcttcttttatcagcttcaaaaaggggtttcgccaagtattttattaggcattgccgtatttatcggggtcattggcaatagccttgcaacctttagtaagcgtatcgcctcagatatcggcttttattcttttgaatcccactttacaagctatagtgtcaagaactatttatgggatcaatcgatcgtacaactgattttgaacagcttgatctttttagcagtactagtagttgctgttctaggttttcactttccagtgacgactagcctgttggtgcaatttttcctcttatccttgatggggatctactttagcgtgattggctttgttcttggggtaagagtagatgccaagacgattgataccattggctttcctgtcattattttggccgctatgaccattattccctttgatacgcttggcgcaagtggaggatttatggacttggttggcaagctacaacgggctttcccaggctattattatacaaagctgatccaagatttgactgagaaacaaacgatcgatgtctctcaattggcgctctttgttgccgtatttggattgaatttgctatttttctatctgctcgtacccaaaggaaaaatggggaactaagagcagttaaaaagaggctgggacaaaagtcctagcctctcaattgtttttggattgtcgagcaagacgcagtggttgagtgggctctactacgctgatttcatcagcttttacagccctactcaactgtgcggaggtgggacgacgaaatcgaattctaacgaattaccgatttctgtcccactctcttttctttgctataaaacggttattcggtattcgtccgtcaagtacttggataggttttgccaatcttcttccttaaatttacaaagattgacgaagagttttacggtatggtgctctgtatcaatgatggtattggattttgagagattttctagtgtagtattgtccctcagttgaaagtcgatgaaataactcttactattttggtgatccgggtcactgacatcaaccactttataggctgcactcagcaaatcttccttgggaataaagatatcttttgtcagaatcactccctgataagcatggatcccatcagaagtcagctcaaaggcgatctgacgactggtcagtcttttgatcccagcaatggttgcatagatcgcaatcaacaataaaaggatctgaatgagagtgataaaagtgatttttggaaacccctcaaaacctaggatcgataaaaaagctaagtggataaagagcgcacaggcaaaagccagagagccatatccgacatattttgaataatagattttcattttggactccttacatttaagatgcaacgaaaacttggaatttcaagtacccttatcatagcggattcgatgaagagctgtcaaatgtttgctagggttcaaaggtgcttttttattttaaatggaataacaatgatgcaggatattctatcttcgtacgctacattatagtgtataaaaatatgagccaaatacttttgagacaagcaaaaaagccttggttttcaaggctttttgtgcataaaaaatgccccctacatggatttgtaagaacttttcatattgaaaataaacaaaaatattgaaatatagctgattttaggaaatacttttaggtattttcaatgtcaggatttaaaaatggggcaaaagtggggaaaaacgaatgactcgcatttggtttgaaaatctataatacctaatgattatgctatactagatatatagtgttgttataaataaatgtcggcgtgagaacaaatcggaggataaaatggaaaaacaaattaatgaaaaaattcgtgagattgcacagagtgttaatgagacaataccagtagcatgggataatctttttattaacataagtttagcttttgatggaggagaggtatattatttctttaatgaagaggggaaaaatgagtatatctacaatctatatattccaaagcggtatggtattcctaatttagagtttcggaatcaagaaagacgcacctttagattagcttgggagttgagagaaatttttgagaaagaaggccaacctttgtggacttcttgtactataaaagtaattagcacgaaattatctgctgaatttgactatgcaccttggaatgaaagtgattatagttcaggtcaacaaatggacttttttgaatataaatatctcggcaagcaaccagcgaatgaaaaagagcttgagcagttcaaggccatggaagctttccaaagagagcataatgggaaatagctatatctaaagaacaacccacctcggaggataaaatggttcaacagatgaatgataaaattgcatttttaaatcgatacacgttgtcatctaaaaataaagtagaatttataactgataaatcaacgattttaaatgcaccgattccagaatattggaaagcggcatttctagccgatactttggaagaatacttggagcaattctacgcagaatggaatgcgaaaaagtgataattaaagagacaaaaaagctgagaatatgatttcccagcttttttgaatgcgatagaaatagcaactagactatttacgaaagacctcaataatgtaggtgaagccagtaactaaaaatgcaaaggcaatgacataaacgacaaagacacctgtagccactggattgaacagaatcactagacctagtaaaaattcaagcaaggctacccacatgatattgctaccaataatagggaaaatcaatcctagacgattgcctttaaagaaagcaataatggcttctacaattaaccaaattcctacaatggtcggaatgacgaccggcagggtcacaaagccataagcaacgaggtaaagagctaagagaagactaacaaatccttggaaaagataaacaggtgagcgaagctcttttggtgcagagaaatagcctaaaatagctgctatagaagaaaccagtaaaccaaatgaaatccaccagctgtaagcaacaagattagctactgggtttgtaaataggaaaagtcctaaaaggacaaaaacaactcctgcaaggaatagcagtaaacgattagaaaatttcatttcaataccccctatatagtatagtttgctaataaaactattgtacttatttttatagaaaatgtcaataaaataaataaacaatttggaagtttcagtctgacttacaaaaagaaaaggagttttcactccttttcacagattgaagacaaagtccttataaaagtgtcttctaaagattttaacttcaatctgaagcgaggttatcctcgctttttctatttatcaaacaattccttattttcaattaagagttctagtggagatttatcccttgcttcaataaaaccaggttcatattggttatgaagtgttcttttctgagaagttggatcaatatacaactcatctccatcttctgtgtatagttggttgcctcttgttaagtaaagtaaatcctctaagtactgtccatcagtttctagaaaatcttcgatgtatttgacagcttttaaaatctcacttactttatcagagtattcattagattcaagaatactcttttctaactcaatctctttactagttccaaatagttgggttggagttgcattaaaatattctgctatcttatccaaatttgcaaaggtaggatagcttttttgtttttcgtaatcagagatgtctggaaagattgctcataaaaaaatgtggggcaaatgatggggcaaatcagttatagacaagcaaaaaagccttgtaactcaaggctttttcctgttgatttagatgccccctacagggctcgaacctgtgacccatagattaagagtctactgctctaccaactgagctaaggaggcaaatataaaaagctgtattggtgccgaaacttcacgatttgtattgaacccgcgcaattaagcaggtgggcaactcgctctgacttagctgcttccgcgtgaaacggcctgcatactgccagaagtcttttgtttccctaataatacaaaaaatagtcggtcaacacttaagtgtgagttcgtacaccacagcgtttctatatgtatatgataccacattttgaaaatatttcaagggaaaatctcaattttttgaaaccgatgtcactttttcttaaattgatcaatcttctccttggtggctccgagagcacgctcgtacttgccattttcattgggaataaagtaggaggcgtgtttgagcttgtctggcaggtagtcctgattgacccagttgccagggtagttgtgaggatatttatagttttgcgcatttcccagttccttgcttccggcgtaatgaccatcgcggaggtggcgaggaataggaaggttgccagaacttctaagatcagccagcgccttgtccatggcaacgtaggctgagttggatttaggcgaaagggctagatcgatgacgatgttggcgatgagaatgcgagcctcaggaaagccgatgcgctcagctgcttgaagggctgttaccgtatgaatctgcgcatctggattggccagaccgatatcctcataagcgatgacagtcaagcgacgagcgaggctgggcagatctccggcttcgatcaaacgagcggcgtagtggagactagcatcgacatccgaaccacggatagatttttgcagagcagagagcacgtcgtagtggccgtctccatctttgtccatggtaatgtagctgcgctggaggctgttttccatgatctctagcgtaatatggcgaatcccttctgcattttcagaggtcgacagcaccgctagatcgagagaattaaaggcagagcgaagatctccattggtcgaggtagcgatgaaatccaaagcatcctcgtcaagcacgacaggaaagtcaaagccacgctcggggtcatctagcgctgtcttcagtgcctgtttgacctcctccgttgttagaggctccagctcaaagatttgtacgcggctacgaatagcgggtgtgactgagaaaaagggattttcagtcgttgcaccgatcatgatgactagaccactttcgagcaatggcaggagaaaatcttgcttggttttatcgaggcgatggatctcgtccaaaagcaggaccaagccaccagaaaatttagcttcttctgcgatttcttggaggcgttttttactgtcaaccgttgcattaaaagtccgaaaggcatacttagtcgttcctgcgatcgcagaagcaatactggtctttccgatccccggaggtccatagagaatcatagaggacagacgattggcctcgaccatgcgacgaatgattttgccttctccgaccagatgctgttgaccgatgacttgatcgatcgttcgtggtcgcatacggagtgcgagattgtcgggcatttccttctcctttctagctttgtctcctttcaaagaggcgttttttatggtaagattgtagtaactattgtaacatattccgctctaagagtgggaaattagaaagaggacgctatgtctaaatacggatttttggatgttttagaagaggagatggacaaggtttttccctttgattttgagatcaattgggataagaaaaaccatgcggtagaagtggcttttctcttggaagcacagaatacgggaggggttgcactagttgatgaagctggggaagagtctgatgaggatatcttctttgaagaagctgttatcttctacaatccagccaagtcgcatgtggaggaagatgcctatttaacggcgattccttatgagcctaaaaaaggcttgtcacgtgaatttctagcttattttgcgactttccttcgagatacagccgagctagccttggatgagctcatggatttcttagcagacgaagaggcagagagctttgagatcatctggaaccaagaagtttttgaagaaggcaaggttggcctagaagaaagcaccttttatccctatccgcgatattagaaaagattctaagtggacatttttaaataatgaattcaaggagaagggggagactatgctagaaaaagtcaaacagtttttcaggagaaggtcagctaaaactgagccgtcagttgatattcttccccgcaatcgctttgcggatctagatttcgagcgaatattgaagtctggaactcgtcgccttgtcgatgaggaggggcgctatgcagaagatggtacagtcacagaacttgaatttcctgaagactttgcggaatttgaatttctagttggttttaagacggaggaagaagagcagtttcaacaactattagctcgtttaaatagtattgacaatgccattcagtcttgtttggaaagtgagatgcaacaacccatccctcagtttgccaaggatttgggctatactcagaagaggtgggagaaaactttttacttccatccttgggtattaagttttgaggaaaatccgcctaatcttcgctatgttgcagattatgtaaatgatgagtttacggtttattttgctaacaaacatggtagatggcaggcgtactgggatgcagagtgccaaaaagtaatcgaagaaagctagctcgtattttcctagagagtaattgttatcatagaaaagagtaaatatcatggaattattagatagcagaatggatttccaaggttgcaagattgccttgatttgtggggataaggtcttgactatcttacgtgatgacaaggacgatatcccttgtcccaacatgtgggagttgccaggtggtggccgcgaaggggatgaaaatccctttgaatgcgcagcgcgtgaagttcatgaagaactgggaattcatttaaatgaagattgtttgctttggggaaaaatttatcctagcgtaatctttgaaggcaagcaatcggtctttatggttggtcagctaagacaagaacaatttgacaatattacctttggagatgaagggcagggctataaattgatgaacattgaggagtttttgaagtctaaacaggcagtgcctcagctacaggggagattgagggattatttggaggaaagtttatgataacacttgttcgagcgggagcagaggatttagaaactattattgcaattcagagagccagctttaaggctgtttatgaaaaataccatgatgaatatgacccttatctcgaggaccgcgaacgaattaagtggaaattagtggagcgtcccaatagctattactactttgtaaaagaagatgaagaaaacatcggatttttacgagttcagaccaatgccgagttaacgaaagcttggttgggaacggcagcgattttgcctccgtatcagggaaaagggtatggatctgaaggattacgcttgctagaagaggaattttcaaccgttagacaatgggatttgtgtacggtattacaggatgcaggcatggtcgccttctacgagaagaatggctaccaacaaacccatatcgaacctgaaaaagaaggcatggatatggtctacatgaaaaaattgatagagaaatagaaaggatggttcggttaaatttctaaactgaacccgccctaaacactgtgccaaaaagataaacttctcttagatacaaacgtcttcagagaatttcctattttggctttgtgttttacgggcttggtatcttaatgatggaaacatggcaagagttaaaagttacagtcaagcgtgagggagaggaattagtttccaatctcttgattgagttaggtgcccaaggggtagcaattgaagatagcatggactatgtgggaaatgtggaccgcttcggtgagattttccctgaggtcgagcaacaggaagaaatcgtggtgactgcttactatcccgaaacggttgatgtagtagctgttgaaacggatttgcaggatcgtctctcagaattgacagactttatggacttaggagaaatcaagattggcacgactgccttggctgaggaagactgggccgacaactggaagaaatactatgaaccagctcgcatcactcatgacttgacaattgtgccgtcatggacggactatgaggcgactgcgggagaaaagattatcaagttagatccaggtatggcctttggaactgggacccacccaacaaccaagatgagtctttttgccttggagcaggttcttcgtggtggcgaaacagtgctggatgtggggacaggttcaggcgtcctttctattgctagctcacttctaggtgccaaggaaatcttcgcctatgacttggatgatgtagcggttcgagttgctcaggagaatattgaactcaaccctggcatggaaaatatccatgtagccccaggtgatttgctcaaaggtgtggagattgaggcagatgtcatcgtagccaatatcttggcggatatcctaattcatttgacagacgatgcttatcgtttggtcaaggatgaaggttacctgatcatgagtggcattatcaaggacaagtgggacatggtgcgtgagtcggctgagtcagctggatttttccttgaaacccacatgatccaaggggaatggaatgcctgcgtcttcaagaagaccaaggatgtctccggtgtgattggaggctagcatgcagcagtattttgtaaaaggtttggctagctcacctatcactatcgaggacaaggaaaccagcaagcacatgtttcaggtcatgcgcgtgaaagaagaggatgaagtgaccttggtctttgatgatgggattaagcgattggcgcgcgtggtcaatgtggaaagccgtcagttagagttagttgaggaattggatgacaatgtggaactgccagtccaagtgaccatcgcatcaggctttcctaagggagacaagctggagtttatcactcagaaagtaacagaactcggtgctagccatatctgggccttccccgcagactggtcagtcgctaagtgggatggcaaaaaattaggcaagaaggtcgaaaagttagaaaaaatcgcccttggagcagccgagcaaagcaagcggaatctggtaccaagcatcagtctctttgagaaaaaggcagactttctggctcagttcgaccagtttgaccagattgtggtggcctatgaagagtctgctaaagaaggagaggcagccactctgattcagtcgctgaccggattagaagctggaagcaaattgctctttatctttgggccagagggaggcctctcccctgcagaaattgaaagctttacagctaaaggagcagtgttagcaggacttggacctcgcatcctgcgagcagaaacagccccactctacgctcttagcgcagtgagtgttgttacagaattaatgaactaacgaagtgaaggaatcgcttcgttaatttttttacaaaagacttttacgaatgatgaaaagcaaggtggatcccagaatgatcttcgagaagtatccgtatattaaagtagcttcattggttcccatctgcttctaaaagtgttaaaatagtatccaagaaactggagaaaatacatgccgaaagaagagaatttaacaggggaccaagtcgttgcccttacaaaaaaatatttatcacctgaagatgttgcttttgtacaaaaggctttggtctatgcggttgattgccataatgggcaattccgtcagtctggcgagccttatatcatccacccaattcaagtagcagggatccttgccaagctgaaactggatgctgtgacggtcgcctgcggctttttgcatgatgtcgtggaagatacggatgcgactttagatgatttagagcgcgaatttggtcatgatgtgcgcgtgattgtcgatggggtgaccaagctcgggaaggtcaagtacaagtcccatgaagagcagttggcggaaaaccatcgcaagatgctcatggccatgtctcaagatattcgtgtcattttggtcaaattggcagaccgcttgcataatatgcgtaccctcaagcatttgcgcaaggataagcaagagcgcatttcgcgtgagaccatggagatctatgcgccactcgcccaccgtctcgggatttccagcgtcaagtgggagcttgaggatttgtccttccgttatctgaatgaagttgaattctacaagatttcgcatatgatgaaggaaaaacgtcgcgagcgagaagagttggtcgaagaggttgtccacaagatcgagacctatgctggggaacgccatctgcatgggaaaatttatggtcgaccaaagcatatctattcgatctatcgcaaaatgcaggataagaagaaacgcttcgatgaaatctatgacttgattgccatccgctgcatcctggacactccaagtgatgtttatgccatgctgggctatatccatgagctctggaagccaatgccgggtcgatttaaggactatattgccaaccggaaggccaatggctatcagtccatccatacgactgtatacggccctaaaggaccgattgagttccagatccgaaccaaggaaatgcatgaggttgctgagtacggggttgcggctcactgggcctataaaaaagggatcaagggtcaagttaacagcaaggaatcggctattgggatgaactggattaaggagatgatggaactccaagaccagtcaggcgatgccaaagaatttgttgaaaatgtaaaagaagacatcctggcagaagagatttacgtcttcacaccagatggaaccgtgcgctcgcttccgaaagattctgggccgatcgattttgcctatgaaatccacaccaaggttggggaaaaagcgattggtgccaaggtcaacggccggatggtgccccttaataccaaacttcggacgggagaccaggtggagattatcaccaatgccaactcctttggtccgagccgtgactggctgacccttgttaaaactagcaaggcgcgtaacaagatccgtcagttctttaaaaatcaagataaggaattatcgattaaccggggtcgggacctcttgatggcccaattccacgagcatgacttggtagccaataagttcatggacaaaaagcacatggacaaagtgctacaaaaatcaagttacaagacagaagaagccttgtttgcggcgattggttttggagagattggggctattaccatctttaaccgcttgacggaggatgaacgccgggaagaagaacgggctaaggcacgcgcagaagcagaagagctggtcaaaggtggcgaggtcaaggttgaaaataaaaaagacaccttgaaggtccgtcacgaaggtggcgtggtcatccaaggcgcttctgggctcttgattcggattgctaagtgctgtaacccagttccaggcgatgaaatcgttggctacatcaccaaaggacgcggtgttgcgattcaccgtcaggactgtatgaatctccgagctcaagacaactacgagcaacgtttgattgatgtggaatgggaagataacaacacgaccaaggactacatcgctcacatcgatatttacggactcaaccgtgccggacttctgaacgatgtactacaagtcctctccaatacagctaagatggtctcaaccgtcaatgcccaaccaaccaaagacatgaaatttgccaatatccacatttcctttggaattccaaacctgtctatgttgacaacggttgtggataagattaagagtgtgccggaggtgtactctgttaagcgtaccaacggctagtcttctgcgaaaatcgacttcatactgcgttagtttcgactggtctaactacagttatgcctgcgtctcactgccttgtctgatgtcgattttctttgaagaagctaggatatgttcagaactcttttattgcttgattagctcgtcgtctgtggttgatgttctttcaagggtagcagtgaatgttcaataggtttataaaacaggataataaaatgaaattagtaattcaacgggtcaagagtgcctcggtttccattgatggccaagtttacaatgcgatccagcaaggcttgctactcttagtgggagtagggcctaaggatgaccagaaggatttggagtatgcggtccgcaaggtatcgcagatgcgtattttctcagatgaggaagataagatgaatctttcggtcaaagatattcaaggagaaatcttgtcgatctctcaatttaccctctttgcggagacaaaaaaaggcaaccgtcctgcttttataggggctgccaagccagatatggccagtcagttatatgatgcctttaatgatcaattagaaaaagaagtccctgtcaaacgagggatctttggagccgatatggcgattgaattgatcaatgatggtccagtgacgattttgctagatacaaaacatccataagtaagaaaacatgcagtcgggttagactgcatgtttttcgatatagagttgttgggcgatcacttggttgatagaaatttcttgtccatggataacgaagtgatagaggcctgtgtagtcatcgtaccgttgaaacacgatggtatcaccaatttggagatggatctggtctaaaaattttaacaattcataggtgtcatagaccctttgcagaatatacagaccaggctcagtcgtttcactgagacggtcttggtaggcttcgacaagcctttcacctttctttggaattgtcccaccatgagggcaggtcttaggatttccaagcatgtgatccagccggtcgatgaaatgttcagaaacggtatgctcgagaacttctgcctcttcatggacttcttcagttgtgtagccaagatttttcagcagaaatacttcgatcaagcggtgcttgcggtagagatcagagaccaattgcgagcccagatctgttagtagatagccatgggtcttatctttcactaggagaccctcagagaccatccgcttaatcatttcggtcacagcgggtggagagacctgcatgcgactagcgatttccttattactgattttttctacttctgtgccaatttcataaatgcacttgaggtaatcttctttgtttggtgtcatgctttcctcttttcttcgctcacttctagtatatcaaaaaaatcttcaaaaacgctagtggagtaatgagaattgtctcaagctccaaaagatggtagtatagaagcatagaaaggacggcactatgaacagacgggaattagtgagattaggctggagagagagtagtttagcctatctagagaagcacttgcagggattgaaagatccacaagcctaccaagaacaataccagtctgtctttttctttgccagtcctctgtttcaaaatatgtggtttcaagagatcaaggatctaacggaaacggctgcccaagacttgctgaggggagtcatgaaaattcttcttatgccaagtgacctgtccggaacttgtgaagaaacagcctttcttctgagtaggatggctccagattgtccgccaggttccgatttttggaaggttttttcacacgtcgtgcaaatcgcctttgaaaaggatcccttagcagatcagtcgggagatcagctcttgaaacgccaggttcaccagttgcgctacctactttcaagttaccaagcccagtggattcggacgcatgaggccagagctggacagactgacgaggaggccttacaagcttacttacaggaggctagagcggtcacggtggatgcttatgcggctgcccgccttcacaataaggtctccctaaggcaagatggtcaccttcattatccatcaggggcttcccaacaagtcaatttcaaggtcttgttgaattttcatacggagtatattctcgatcaagctgggcatttcctcaatgaagtcgatccgtatcagatttctgaaaatggcattgtcaatggagccagtttcaactatggcttagccaagggccagacccataaggacttagatattgaccccgtcaaagcttgggatccaccttttcgtaagaaggtcctctatcagcaaggagttcgctatctagctccgaagaatgaccgcggagagcaaggttattggagtcgaaaaggagtctttgcacaaggaggcaagagctacaagcaacaagtggcacagcgcgtgcggcatttcctcagaggcatccctcgcttacgctggcgcgtcctcctacagaatggacttcatcggattttatagcaatggaaaagaggtcgcagacctcttttttcatttatccaagcgcattgacggcttcgattgcagcgtcgtaatttggttcgctgttgatattgtctaggtattcaacgtaagtcaccttgttatccgcatctaagaccaagacagcgcgcgcaagtaggtgccattcattgatcaagaggccgtatgctttcccgaaggaatggtcgtagtagtctgagagcatgatggcattgtcgagcccttcagcagcgcaccatttaccttgagcaaaaggaaggtcgacagagaccgtcaagacgacagtgtcttccatatccgataaggtttgattgaagtgacgtgtttgcatcgaacagatacctgtgtcgatggatgggataatgctgaggacttttttcttgccagcaaaatcagctaaagatttcttctcaagagctggagtgatcaatgaaaaatcatgggccatttcccctacttgaagttgagatccggtaaaggtcacagggtttcctaaaaatgttgccataaaaagactccttttttcttttcattgtacatcaatgaagggggaagagccactgatttgtttagaaatctgaatggtctactgactcaatccttctgcgatcttgtctaagttccacttcatcatgctgtagtagctatcgcccttttctccttctttggcaatagaatcagtgaagatctttgcatagatcgggatattggtatccttagagacagttttcatagggcgttcatcgacactggattcgacaaagagggctggtaccttggtttgccggagcttttctaccagcgttttgatttggtcaggtgtcccttcttcttccgtattgatttcccagatataggcagatgggacgccgtaggctttggagaagtacttgaagcagccttcgctggttacaatcatcttcttctcttctgggatattgttgaatttttgtttggcttcttggtcgagcttgctgagtttttcagtataggcagctagatttttttcgtagaagtccttgtttttgggatcttttgcgatcaattgtttggcaatgtttttagcgtagaggatcccgttttcgagattgagccaagcgtgagggtcttcttttccagcttggttttggccttccaagtagatgacgtcgactccgtcgctagctgcgaaatagtctttgttttcaactttattggcatttttgaccaatttagtaaaccaagcattgccaccggtttcgaggttgatcccgttgtagaagatgaggtctgcttgcgaagtctttttgacatcttctggaagcggttcgtactcgtgaggatctttgccgacaggaacgatactgtgcagatcgatcttatcctcagcaatatttttagttatatctgcaaggattgaattggtggtgaccactttcaatttaccagaagctccagaagaagagcctttgctacaggccaacagaccaaataagagcgccacaaagagggcgaggatagaagcggtttttttcatgtgtttctcctttaatgagatgaaagagcgtgcttattctttctctgcttaggagcgataaagaagctgatgagaaagaagacagcagaagtgaggacaatacaagacccgacggcgatgtttaagctatagccaataaagagtcccaggatggatgcaagagcacctaatccggatgaaaggagcatcatggaccagagactattggtatagagataggccgtcgcagcgggtgtaatgagcatggcgacgatgagaatggttccgacactctgcatagcagtgacagaaaccaaggtcaagagcaccataaggaggtagtgatagaccttgacccggacgcccatggattgagccagaacaggatcaaaagatgtgagcagtaagggtcgaaagagtaggacaatcaccagcaagaccgcagcaccaacaccgatggttatccacatatcccggtcttggacggccaagatattcccaaagaggatgtggaaaaggtcggtggaacttttagcgactccaatcaggatgactcctaaggcgaggaaagaagaaaaggtaatcccaattgcagtgtcgctcttgatgatggagttgctcttgatataggtgataaggacggacgccaggaggccaaagacaatagcgccaataaagaaattgatgcccaggataaaggagagagccacaccaggaagaactgcgtgtgagatagcgtctcccatgagagacatgcctcttaaaataatgaagcatccaacggctccagcgacaatcccgatggcgatggctgtgatcagggcattctgtaagaagtggaattgctgtaatccatcgataaattctgtaatcatccgacgccacctcctataaagagttcatgcccataggctgcatgcagattttctttggtaaaggtttcctctgttttcccaaatgcaatcagtttacgatgaaggaggaggacctggtcgaaataagctgggaccttgctgaggtcgtgatggacgatcagaatggtcttgccttcttgtttcaaggtctggagggtctgcatgatgatgtcttcgctgacagagtcaatccctgcgaagggctcatccaaaaaaatgacatccgcttcttggaccaagcagcgggcgatcagcacccgttggaattgccctcctgaaagctggccgatctggcgatccgctagatcaagaagattgacaagtttcaaggcattttccactttttggagatcttctttgctttttctcttgaagatagaaaggtggggataaagacccagtgagatgcactctctcaccgtgatgggaaagtggaaatcaatagcggatttctgttcgacgtaggccacccgttgaagaacttggctgagatctttttgatcgagctggacctttcccgcatgagggagaagtcctagcatggccttgattagggttgattttccagccccattggggccaagaatgcctaggatggttggaccctggatggtgagggaaagatcctccaaggccagtgtttgctggtaagcaacactgagatgttcaaattgaatcatgattttgctcctttaccattaatatacatgaataaaaaaattaagtcaagttaatttttgaaataattatacacgaataaaaagttaagtcaagttaatttttaaaataattcaacttaaatctcttgaaatcattgaaaaaagttcctatttttgataaggttattagaaaagaatgaaagcgagaagatcatggtacgtttacaagatgatttttatgattacgtcaatggggaatgggctgagacagctgtgattcctgatgacaaaccgtcaactggtggttttatggacttgatccaagacatcgaaaacttgatgttggatatcactggaaaatggcaacggggagaagagctgcctgaagatagcattctgcaaaactttgtcaaataccataaaatggtggcagattttgatgcgcgagaagcagctggtgtggcaccagtcatgcccttgatcaatgaaattaaggctctgtcttcttttgaagactataccagcaagttggggacctatgaactagctggcaaaccaaatctcatgccatttagcgtgtcaccagactttatgaatgcccaaatgaatgtcttgtggggagagtctcttgctctcatcttgccagatacaacctattatgaagaaggcaacgaaaaaggcccagaattactggctatctggcgccaaatgatggaaaaactcttacctaaatttgaattctcagaggaagaaatcaaggatatcctggataaggtcattgcggcggatgcagaattggccaaatatgttttgtcaaatgaagaaagatcagagtacaacaaactctatcatccttatgagtgggcagatttcaaggccttggtcccagaattgccactcgatgccttctttactgaagtgatcggacaaacaccagataaaatcatcgtgccagaagagcgtttctggaaggaattcgcaccaaaatactactcggcagccaactgggaaaccattcatgccaaattgaaacttggtgcagctttagattggacgtctttcttgacggaagaaatccgtgtcttgtctggtgaatatggacggatcatcacggggatcccagaacctcgtccaaaagaaaaagccgctctggccttggcagaaggaccttatagccaagcacttggactctggtatgcgggagaaaaattctcaccagaagcaaaagcagacgtagagcataaagtagcgaccatgattgacgtctataaggagcgcttagaaaaagcagactggctcgctcctgaaacccgcgaaaaagccattgtcaaactcaatgtcatcacaccgcatatcggctaccctgaaaaattaccagaaacatacgccaaaaagatcatcgacgagagcaaaaacttggtagaaaatgcccaaaaattggctcaaatttccattgcccatacttggagcaagtggaaccaaccagtcgatcggagcgaatggcacatgccagctaatatggtcaatgcctactatgatccgcaacaaaaccaaatcgtcttcccagcagcaattttgcaggcacctttctatgatcttcaccaatcgtcatcagccaactacggtggaatcggtgcggtcattgcccatgaaatctcccacgcctttgacaccaatggtgcttcctttgacgagcacggtagcttgaaagactggtggaagccagaagattacgaagcctttaccgctcgcacgcaaaaggtcatcgatcagtttgaaggccaagactcatacggtgccaagattaacgggaaattgactgtttctgaaaacgtggcagacctcggagggatcgctgcagcccttgaagcagcgaagaaagaagcagacttctcagcagaagaattcttcaccaactttgctcgcatctggcgcatgaaagctcggacagagtatatgcaactcctcgcaagtgtcgatgtccacgcaccagggaaactccgtaccaatgttcaattgccaaactttgacgaattctttgaaacctttgatgtcaaagaaggagatggcatgtggcgcgcaccagaggatcgtgtaattatttggtagtctcgacttcagttaagcaattgattgatttttttgatcgctcgtgaaaaaaactaaaaatccccgaagccaagtttcagctgactgaaactagctttggggatttttgagtggattagaaataataaggaacgtcaaacgaaggtggagcgctttcgatcattttgtcgacaaaccaagaactcccataccttatggtaatgggagttctttttctattttcttctttttggatcggtttgtttaaagatcaggtataaaattccggcaggcaagaagcagaagagccacataacatcgagtcccttgcttttactgctagaggtcgttgctttagactcactgacggccactcccggtttaatgcttggagatacctgttgcaagccgttctggacgactaggcggttattttctagttttagcgctggcttcgtccccttcttaacggtcgcatagaagtcttgcttcaagtgaattgtcttcccgtcgatggtatgatcgcctgcagagaggatttttttatactggtagtctgcgaacattttctcagccaaggtattcccgatttgattgcggtagctttcggcgatctcgacatcgtagttcccaacccccaaaatcacttcgataatccgctgtttaccccgcttggttgtcgcggtgtagttgtagtcagcagtcgggctggatccagttttgagtccatctgttcctttaagggcgaattttccaccttcgagggaagtgttgtaattatcgtagctttgctcgtagggggttccttccatgatggtagtatgagcttgcttggtgtattccaacatttctggcaggtcgtttacgatgtgataagccagaatagacatgtctcgcgctgtaatttcgttattcgcattgacgtcgtggcgctgaggattgtagtagccctgaaggaccgagatcatcgccccatttggattgtgccattcggtatggctcatccccatttcttgtgcgtactgattcattaagtccaaaaacttatcgggatcattgtcagtgacggcgttggcgagcataatcacagccgcactggaagatggaacaaagagcatcttgatcaattcagatactttgtagtctacaccagctacaatcggtgagttacttaacagattgttttctgagatggcttggtctgcctctgttgctgtgactacggtatcgtacttgatcttgccttctttaagagcccgaaagaccacataggcactcatgagcttggccatgcttcctgagtcccggaccgtgtcgatattgtctccgtacaaaatggctccagtattggcgtcgatgacgatgtcggccttgggcttgtaaaaatcgtccaataccagtccagcatcagctgcgattttcatgacatcttcttgctggtagatgtcgtccgcaaaggcagtggaaatagggcctaatgtcaagactcctacaaggagggacaagaggctgtgttttagtcgtttgtgtaaatgtctcccataattcatagattccattatatcatacaggccagggatttaacttgaaaaaattctagaaaaagaagaaattgaaaaaataaagaaaaaatagaataatttcgcagtaaaagcgtttacatttccctagaaagtgctataatttaaattgagtataacattttttacaatgaggtgatttatatgaacaaagggaaggtactcttagctaccagcgctctgcttttatcagctggtgtactggcagcctgctcaggaggaaaatctggaagtcccggcgatcagacttttagctatgtctatacccaggatccggatactctcgactattcgatttctaataaaaaatcgacttccgagtttacaggaaatgcgatagatggcttgttggaagtggacaagtacgggaacttgatcccatcgcttgctaaagactggactgtttccaaggatggcttgacctatacttataaactccgtaaaggggtcaaatggatgacttctgaaggggaagaatatggagaagtcaaggctcaagactttgtcacaggtctcaagcacgcggcagacaagaaatcacaagcgatttacttggtccaaaaatctgtcaaaggcttggatgattatgtatcagggaagacatctgatttctcaactgttggtgtaaaagctattgatgattacactgttcaatatactttgagtcaaccagaaagtttctggaattctaagactacgatggggatcctgatgccggtcaacgaagaattcttgaaatccaagggagatgattacggtcaaggaacctctccgtctagtatcctctactgcggaccttatttgatcaaatccattacttcgaaatcttctgcgatattagaaaaaaatccaacctactgggatgcggaaaatgtcaagatcagtaaagtcaaactgacctattatgatggtcaagactccgagtctctgatccgtggatttgataacggtgactatacagttgcccgtgttttcccaaatggttccaactataagagtgtagagaagaagcataaggacgacatcgtctatactgaccaaggttcctcaacctataacctttccttcaacattgaccgtcaggcctatgaaatcacaaagaagaccacggatgctcaaaaggcctctaccaagaaagcaatcttgaacaaggacttccgtcaagctattatgtttgccttcaaccgcaaggcttatgtagcgcaaactaacggggaagcgggtgccaataaggtgatccgtaatacctttacgccaccaaactttgtccaaatcgatggcaaacaatttggtgatgcagtagaaaaagacttagaagcttatggggatgaatggaaaggggtctctgtcgcagatggaaaagacaccctctacaatccaagcaaggccaaagaagagtttgccaaagctaaggcagaattgcagtctcaaggagttgaattcccaattcatttagaccttccaacttcttcgacttatacggaaggaatcaaacaagcccaatccttcaaacagtcgattgaatctacattgggagcagaaaatattgtcatcgatctgaatatggtttctgaggatgatcttcaacgagtgacttactttgctgaaaatgcttcccaacaagactgggatctaaacaataacttgggctggggaccagactatacggacccatcttcttacatcgacatcaccagtggtaaatctggtgaaaatgccaattcttactttggattcgatgctggtacggataatgcggcggcaaaagcagctggctttgatgagtacaatcaattaattgaggacgctcaaaaagaaaacactgatgtgaacaagcgttatgaaaaatatgctgcggctcaggcttggttgaccgatagcgccctcttgattccgattcattcggatggggcttctccagtcgttcgtaagactgtaccatactctgcagcctttgcttggacaggccacaagggtcaaacctttaactataagtatttagaagttcaagacaaggtcgtagcggcgaaagactatgacaaagcgcgtgaacaatggaagaaagaaaaagaagaatccaataaaaaagcgcaaaaagaacttgaaaagcatgtgaaatagacttttcttagcgaaaacaggatggacaggtcccgtatgggacctgtctttttctttgtctgaacctttaaaaatcgcctaaaaatggtataataggagcatcacgaaaattggagagacgctatgagtttttacgatcataaagaaatcgagcctaagtggcaaaaatactgggctgaccatcatacttttaagacaggaacagatgcttcaaaacctaagttttatgcattggacatgttcccttacccatctggagcgggtctgcacgtaggacacccagaaggatacacagcgactgatatcctcagccgtttcaaacgtgcacaaggctacaacgtccttcacccaatgggctgggatgcctttggtttgcctgcagagcaatacgctatggatacagggaatgacccagcggaattcacagcggaaaacattgctaacttcaaacgccaaatcaatgcgcttggattctcttacgactgggaccgtgaagtcaacacgacagatccaaactactacaaatggacgcaatggattttcaccaagctttatgaaaaaggtttggcttatgaagcggaagtgccagtaaactgggttgaagaattgggaacagccatcgccaacgaagaagtccttcctgacggaacttctgagcgtggaggctatccagttgtccgtaaaccaatgcgccaatggatgcttaaaatcaccgcctatgcagagcgcttgctggctgacttggatgatcttgactggccagagtctatcaaggacatgcaacgcaactggattgggaaatcaactggtgccaatgtcacctttaaagtaaaaggaacagacaaggaatttaccgtctttacgacacgtccagataccctttttggggcaaccttcactgttttggcgcctgagcatgaactagtagatgccatcgtaagtgctgaacaagctgaagccgtagcagattacaaacaccaagctagcctcaaatcagacttggctcgtacagaccttgccaaggaaaaaacaggagtttggactggtgcttatgccatcaaccctgttaacggtaaagaaatcccaatctggattgccgactatgttcttgctagctatggaacaggtgctgttatggccgtacctgcccacgaccaacgtgactgggaatttgctaaccagtttggtcttccaatcgtagaagtgttggaaggtggaaatgtagcagaagctgcttacacagaagatggccttcacgtcaactcagacttcttgaacggtcttaacaaagaagaagcgattgctaaaatcgtggcttggttggaagaaaaaggcttcggtcaagaaaaagttacctaccgtcttcgtgactggctctttagccgtcaacgttactggggtgagccaatcccaatcatccattgggaagatggaacttcaacagctgttccagaaagtgaactcccacttgtcttaccagtaactaaggacatccgcccttcaggtactggtgaaagtccactagctaacctgacagactggttggaagtgattcgtgaagatggcgtcaaaggtcgtcgtgagaccaatacgatgccacaatgggcaggttcaagctggtactaccttcgctatatcgacccacacaatacagagaaattggctgatgaggacctcctcaaacaatggttgccagtagatatttatgtgggtggtgcagaacacgccgtactccatttgctttacgctcgtttctggcacaaattcctctatgatcttggtgttgtacctactaaagagcccttccaaaaactctttaaccaaggaatgatcttgggaactagctaccgtgaccaccgtggagctcttgtggcgactgacaaggttgaaaaacgtgacggttgcttctgccatgtggaaacaggagaagagttggagcaggcgccagccaagatgtctaaatccctcaagaacgtggtcaacccagacgatgtggtggaacaatacggtgccgatacccttcgtgtctatgaaatgttcatgggaccacttgatgcttcgatcgcttggtctgaagaaggcttggaaggaagccgtaaattcctcgaccgtgtgtaccgtttgatcacaagtaaagaaatcgttgcggaaaacaatggtgctctagacaaggtttataacgaaaccgttaaagctgtcacagagcaaattgagtctatgaaattcaacacagccattgcccagctcatggtctttgtcaatgctgctaataaggaagataaactctatgtggattacgccaaaggctttatccaattgattgccccatttgcccctcacttggcagaagaactctggcaaacagtcgcagcaacaggtgagtctatctcttacgtggcttggccaacatgggacgaaagcaaattggttgaagacgaaatcgaaatcgttgtccaaatcaaaggtaaagtccgtgctaaactcatggttgcgaaagacctgtcacgcgaagaattgcaagaagtcgctctagctgacgaaaaagtcaaggcagagattgatggcaaggaagtcgtgaaagtaattgcggtaccaaataaattggttaatattgttgtaaaataaccaatttatttgctgatttccaacctcaaacagtttcccaaactgtttgagccaaccaaacttgtaaatattgttgtgaaataaaattaaaagtccttcagagctaagctctggaggatttttgactcttcttgacaagaaaacgatattttgttaatatcattaacaaaaagaaggaaactatgaataagaaagaactgcataagtttaataatcgttttaacagctttgttttagcctttgaacggttgaaaaaggatcagcacaggaatagtattgataaatcaatcactattaatgaagtccatttgattgatctaataggtcggaatcagcctgtgaatctagtgaaattatctgagttacttgaagtatcaaggagcgctattactcagagtgttagacgtttaaccaagaaagacctcgttgcttttgaatttgcacaggataatgaaaaaaataaatatctgatattatccaaaaaaggggttgaagtttttaacatccataaagagcagcaagaacatattgaaaaagccattttttcagttttaagaaactatagtgatgaggaccttcaaatggttatgaaactgatggatgatgttgaacaggtatggcgagaattaccgtggtaaaaatcacggtaattttaaaactacattgttaatcacattaacaaaaaaagaggaagatatgaatatacaaattgaacttatctcagagtctgagttagcagacgaatcttttaatattgtcatcaatggcttaaaaccaagagaaacatatcgagtcgagatgtacctaactgattattattgtatcaatgctcccatgcttttagctcatgatgttttatggagatcaatagggacttttgtatcagataagtatggtattattgatatttcacaaactccatcttgttctggctcttatgaaggcatttcaacaatgggactattttttaatgctaagcccttgaccaatgagagaaagaaacttccaaactctctttctgaaattcccttattagatcatttttttgtggatatcaaaattatgcaagaaaatactatcattgcagagagaactttcacaagacattacatgagttcgcaaattagtcatcaagatatttacgggaaatattttcaagggagactcttctatgataaaaaggcaataaaaacaccagcattgattattgtgagcggtagtgaaggacggattgaaaaggcacagaatatagctcagcttttatcttctagaggttatatttgcctagcagttgcctactttggtttagaggggttaccaaaacatttggaacgtattcctttagagtgccttgtggaagcaaaggattatctacgtcagcatccccaagtagatagtgaaaaaattggaatctatggacggtctaagggagcagaattcgttttagctgaggagagcctttttaatgacgttcaatgtttggtactaaattcaccctctgatgtggtatatgaagggataaaagggaaatggaactctcatacttcttcttggacgcatttgcaaaaggaacttccctatcaaaagtttcgacttggagattatctattcagtaaattttttagaaaaaccttccccaaagattgctctgctaggatagacattagtagactctcttcgccaatcttattgctcggaagtactgttgatgaaatatgggatgcctcgtcagcaatagccaatattgtctcacattataaaggccaccacattacatttaaaaaataccatgaaataggtcacatgttgacagtggcttatcaacccaatcatcgctatcgaaaagattggcgtttattgatgaaagagagtgaggattcttggttggctacgattcatttttttgataggcatttgaagaagcaataacataagattataaatatgctataatagtcccaactaagataaaaacacagttctggttggtagtccagacgtaggcaagcctatcagtaaccttcctccttggttgtccattcttagggatagatttaaggaggtgctgtcgtggaaacaatttcaattggattgacagtttattttgaagatggattttggcatggtttgttcgaacaagtgtatcgagaaacttatcaagtttgtcgtgtgacatttggtcaggagccaaaagatgatgaaattttagagatgttacagactcagtttactcatttatcttttagtccagaagctacagttaagcaacatgtaaaaatcaagaatcctaaacgattacagcgagctgtgaagaaacaagtaaagaagaaaatttcttccaagtcgaaagaactattgcagttgcagtatgaggaaaggaaaaagatttcaaaacatcaatctagtgtccaaaagcaattgctcaaacaagagaaattcgaacgcaaacagcaaaaacgaagagacaagcataaaggacattaacccttatctctttcatcaaaaaagcttcggtaggaagaaacctaccgaggcttttttaacatgtcgaaaacgattgttgaatatcaggatgatgttcccaatcagctcgatcgtagctgcctgtaatggtgtgttcctctgaaaagagcagaacccgttccacaatcggagcgatttggtcgaaatggtgggaggaaatcacaattgtttttcctgctgttttgagatcttggagtaagtcgacgatcagtttttggtatttgggggagaggccgttaaagggctcatcaaatagcaagagactaggattcatagtgaggacactggcgatagcgactagcttcttctcccctccggagagatggtagggaatgcgatctctcaggtgttcaatctctaaaagagcgagtgtatcattgacgcgttggtcgatttcaactgcagctaagccgagttgacgtgggccaaaagcgagttcatcatagacgcttgtgttgaagagttgcgtatcgctattttgaaaaatgagtcccacctgttgaaacagctgaccagcacgatggggatcttttaagaaaggaccatcaatcgtccaatccttaaagtggtattgaccagaagacaggggtaaaagtccaaccagaattttgaaaagtgtggattttcccgctccgtttggtcccatcaaagcgatcgtttctctttgcttgatctgtagttggatatcgtggattccaatctcatcggtgtagtggtaatttccatcttgaatggtaatcataggctatcctttctaacggagtagagtcgtgacggtaataaggaagactaattccagtagtaaaaggccatcttcttttttccaacagaagggctctttttgtttcctgtccatgccatatcctctcagcaacatggcctcgtagacctctttggtatggttctttgttgagaggtacaagagacccagcagagagccaaaaagatggaggctcactttttgaccaaccgtccgaagttgcacacactcgatttgttggtgaagatgtttccctaaaatataactatattttagggaaatatcaatggtctggacaaaggtctttgggacatgcaactgccttagggcctccaccagttggatgcttgtggtagtggctaaaaagagagaaatattgaggacaatgatccctgcacgcaacaaaaagagtccaccgttttgaaatccttgaaataagatactcggtaaaatcacaatggtagagaaaagaaggaccttgacgaggaccttaaacaggtgaagaagggcttctcctggaagcatggcaatgtgaagtagtaagaggataccgaggatccagagctggatcgtatggtgggctgttgtaatgagaatggctagggttaaaaagtaaacaagccgcatccaagaggaagttttggccttgaatgcgggcgtcgtttgtttcattttgccaagaaaatggcgcaatgtgtgaaggttcatttgtaaatagtgatggcttttggatgcttctagagtcacttgctcttgaaggagccagtcaggaagtttacgcatgagaagtttttgctccgtttattgatcgaatcattttgctaatgatatagaaaataagaacagctgtaatggctgataggatatagccaatcgcaattttagttccaggaatggtgtaatcactgaacaaggcttcaaaagaaaatccatttttgataccagctgggaccttccctttgagcaaggatcctaattcttcagaagaccattctccaaaagccgttccttctgctaggagaccgagagggctcaaaacgatcagacccaagagaacccagcggatttttttgacaaatgaagtcgtatttttggtacttggtgtatacaattcagatggggccacttgtttgacaaagtggtaaatcgcataggtgaagaaggcttcgacccagccggcgaccacaaggtgggcagccatcatggcaggaatcgtgacttctaatccataagggttgtagaggggttgtccagcttcagatgcaatcaagggttgcaaaccaagttcaatccctgttaagagagctgcggcgttgatggcgacataggaacctacgatcactccaagagattcatgatggtgtttgcggaaccaactgtaaatcccatagccgataaaaggcatggcaacagccatattgaagatattggctccaagggctaggattcctccatctccaaataagaaggcctggaggatcaaggcgacagataaggcaagggaagctgcatagggaccaatcaggatagccagaagggcaccaccgacagcgtgtgccgttgtcccccctggaactgggacattaaacatcattaacaagaaggataaagaggctgcgacgccaagcataggggccaactctttattttcctttaattgaactttgactttggcaatggataggccaatcgcaggggcagccgctacagctaagagggcacaacttgcaggactcaaataattatcagggatatgcatcacaaatactccgatctttctatcatacagttaacagattaccacatcgtaaaaccaagtgtcgttacaaaaggagtttaacatttgttactattatagcgaatttttgaccgtattccaaagaagtttgtgtaaaaggggtaaaaaagtctggtcatttggagctgtgcaagaatcttttgaagagtatcttagaaaaaaatgttatttctatatcgaaatagttgacagatgtaacaggcagtggtacaatgaatttgatatttcgatatagaaataaaaaggagacaaaatggacaagatgcaagggggataccaagctttacagatacgcttattgaacgggcgactttttcaaaaactcttgagcaaggaaccagatgctcaatacagaagtgaacaagggaaaattttaacgattttgtggaagcaagagttggggtgcgctactgcgacagatatcgctcttgcgacgggtctagccaataatacattgaccagtatggttaagaaattggaagaacaaggcttggtcacgattcaaccttgcacgcaggataaaaggaaaaaatatatctctttgacagacctcggttgggcgcaaaaggaaattggagaccgtgtcagcaaagaactgggtgagattttttatcaaggtttttcagatcaagaaatccgagaatttgaagtctatcaagagcgtattattgacaatctaaaagctaaagagagtgaattatagtagaggggaaaatgcttatgattgggatgacaggtgtaacaggaaaattaggttcttatgtagctgatctcatagatcagaaaggaattgcttctatccatctggcaagaaggccagagcgtgcaaaggtctatgcgtctgcgaaaattcgtaagatggtgtatgccaatactccagaggtggttgaggccttaaagggtatcgataccttgttgatggtctctgcccgggaaaatccagagcgtgtcaaagagcacaaggactttttagatgccgcaaagctagctggagtgcaacatatcatttatacctccttttatggggcaggtgagaaggcaacttttaccttgtctcgtgatcatgcccagacagaagcctatatcaaggagttagggttcacctatacttttctaagagataatttttacttggacttctttattgatattgctcttgaaaatggagaaattcgtggtccggctggcaggggccgtgtgtcagctgttgcccgtaaggacacttctagggtcgcagcagagattctcttaaaccctaaggaatgggaaaatcaaaccttgaatctaacaggaccagaggatctttctatggaagaaatcgtagagcttctctcaaaagagaccggtaatgccatcacgtatgtagacgaatcggtagaagaggcctatgagtcacggaaaaaatggccagcacaaacttgggagtacgatgcctgggtcagcacctatacagcgattaaagctggggaacaagctggagtttcaacagatgtcgaaaaggtattaggacgtccagctatgaatttaatagatgttttgaaagaaagacagttgcttgaggatgatttatgattgaatacaaacatgtagccttgcgctacacggataaaaacattttaaaagatgtcaacctccgtattgaaaatggagaatttatggtgctagtggggccttcaggatctggaaagaccaccatgctcaagatggtcaatcgtctcttggagccgactgatggcaatatctatatggatgggaaacgcatcaaggactatgatgaacgggtgttacgtctcagtactggctatgtcctccaagctattgccctatttccaaacttgaccgttgcggaaaatattgctctcattcctgagatgaagggctggactaaagaacaaattgcttcgaaaacagaagaactcttggccaaggtggggctacctgctgcagattatgcaaagcgcatgcctagtgaattatctggtggggagcaacagcggattggcattgtgcgcgccatcattggggaaccaaaaatcttactcatggacgaacctttttcagccttagatgccatctctcgcaaacagttgcaggctcttaccaaagaattgcacaaagaatttggtatgaccactatttttgtgacccatgacacagacgaagccttaaaattgggcgaccggattgcagtactgcaagaaggagagattgtacaagtggcagattctgagaccattctagcccagccagtcaacgactttgtcacagatttgtttggaggtgctcaccatgtctaaactacttgcaacctttcaagaacgctttggcgactgggtcactgcactggggcaacatttgcaactgtcattactgaccttgcttcttgcgatttttctggctgttccattagctatttatttgagtatccacaaaagaacaagcaactgggttttacagatagctgggatcttccagaccattccttccatggctcttttgggcctcttcattcctattatgggaattgggacgcttccggccttaacagctcttgtcatctatgccattttcccgatccttcaaaataccattaccggtttacaagggattgatccaagccttgaagaagcaggaatcgcctttgggatgaccaagtgggagcgacttaagaagtttgaaattccacttgccatgcctgttatcatgtctgggattcggacagcagccgtgatgattatcgggacagctactctagcagccttgattggagcagggggactaggttcctttatcctcctagggattgaccgcaataatgccagtctgattttgatcggtgccctatcttctgccttcttggccatcgcatttaaccttcttctcaaatggatggaaaaggccaaattgcggaccatctttgcagcctttgctgtgatggttattggattaggagcttcttatacaccaagtcttcttccaaaaccgaagaaagaaaatctggtcatcgctggaaagttaggaccagaacctgaaattctcgccaatatgtataagatcttgatcgagaaaaatacagatatgacagtgaccgtcaaaccgaattttggcaagaccaccttcctctatgaagccctgaaaaaaggggatatcactatctatccagagtttacaggtacggtgaccgaaagtctcctcaagccagcaccacaagtcagtcatgatccagaaacagtctacaaagctgcccgagatgggatcaaacgacaagacgacctggccttgctcaaacctatggcttatcaaaatacctatgctgttgcagtccctaaaaagattgcccaagagtatggactcaagactatttcagatttgaaaaaggtggaaggacaactcagggcaggctttacgcttgagtttaacgaccgagaggacggaaacaaaggcttgcagaagatctatggtctcaacttacaagtctccaccatggagccagcccttcgctaccaggcgatccagtctggggatattcaaataacggatgcctactcaacagatgccgagctggctcgttatgacctggtggtccttgaagatgacaagcaactcttcccaccttatcaaggggcgcccctcatgaaagaagctcttcttaagaaacatcccgaattagaagctgttctcaataagttggcgggtaaaattacggaagcccagatgagccagatgaactaccaagtcggagtagaaggcaagcctgctgctaaagtagcgcgtgactttttggtaaaagaagggttgataaaaaattaacaaaccattctcaagtctttgcacttgagaattttttaatagaaagcaattttatatcctttcagcaagcttttggggtagagggatagaccttctcttcaaaaaatctccattgagtctggcttaaaattgtgttacaataagccttgaaaatgaatgaaagtatatggaaaaagtatgaaaaaacaaccagtgattggaattacaggaaatgaaagacccttcccggatgatccagacgcgaacatgagttatgcggcgactggttttgtcgaagcggtcaaagaggcaggagggattccattgatcttgccaattggagatgcggccttggccaaagactacatatcgatgattgataagctcatcatcaccggtggacaaaatgtcttgcccaagttttacggagaagaaatcaccatcgacagtgatgattacctcttgaaacgcgatctctttgagttggccttgattgaagaagcgcgtgcggctaaaaaagcgatctttaccgtctgccgtgggacccagctctataatgtcgctctagggggaactctgtatcaagacattgaacatcactggcaggacaatccaggtcagtacaccagccaagagttggtgaccaaggatcagacgatcctgcaagagatctatggtaagaccagtcgcatcaattctttccatcatcaaagtattaaagacttggcagatggcctagaagtgatcgcgcgggatcctaaagatgacatcatagaagccgttcaatccacagatgagagtcgtttcctcggcgttcagtggcatccagaactgcgttttgacaagagcccggcagatcgcaagctctttgaatatgtcgtgaatcaattgtaaagaggaccagctcccttaggaatttttcctaaggggctttttctttaatctgcgtaagaaagactgtaaattgtgcctaggttttgaaggaggatgcgctacaatagagctagtagaatgaggaggattaggacatgtatcaatttccaaaggattttttatgggggagttcgacctcggggccacaaacagaaggacgtttcgcccaggatggaaagggagacaatctctgggattactggtataggatcgagcccaaccgcttttatcaagggcaagggccagagaaaacatcgactttttatgaacactgggaagaagatttggatctcttgttagaaaccggacacaccgcctttcgaacctctattcagtggtcccgtattttcccagaaggacgaggggagatcaatcaagcaggcgttgatttctaccgccgtgtttttgaaaagataaaggaaaaagggattcacctcttggtcaacctctatcattttgatttaccgatggctcttcaagagcaaggggatggttgggaaaataaagaaaccgcctatgcttaccaagaatatgcgcgtttttgtttcaagacctatggagatctggtcgatcagtggatcacctttaatgaacccattgtccctgtggagtttggttatttttatgatgctcattttcctcataaggtagacgcagcagcagctgttaaagtagcctaccacacccagctagcaagctctctagcagtgaaggcctgtcacgagttggatcctaattaccgtatcgggattgtgctcaatttgacaccagcctatcctcggagccagcatccagaagatgtgaaagctgcgcgtattgccgagctctttcaagccaaatccttcttagatccatctgttcttggtcattatcctgaagaattagtggagatcctacgggagcgtgatctcttaccggattatgatccctttgaattgcgcttgatcgaggaaaatacggtggattacctaggggttaactattaccaaccactccgtgtggcggctcctcgttatgctccaaatccagcatctcccttgctctttgaacaattttatgaaccctatgttatgccagggcgcaagatcaatccccaccgtggttgggaaatctatgagcaaggcttgtatgacattgcccaaagcatcaaggaaaactatggcaatatcgagtggatcctgacagaaaatgggatgggggtcgaaggagaggaaaaattccgcaaagatggaatgatccaagacgactaccggattgactttgtcaaagaccatcttcgtgagctccaccgggctatccaagatggtgccaattgtaaaggctatttgatctggacctttattgattgctggtcatggctcaatggctacaagaaccgctatggcttggttgagttggatcttgaaagccaaaaacgaaccctcaaaaaatccggtcattggtttaaagaactaagccaagccaatggatttaaagattaaatcgagatccgtagcccatcttcaattcgtattgagcccctcgtattgtcgttttaaagcttggagtctaataattccccaaacggtttgacactcaattattccgaatgtctgaaaccattatgtttcaggcatttttcttacagtggaaattttctcaaatgactttgtcttcaatcttaacgctaacttaactagaccaattttcttgaatttcctagttgacaaactggaagaagcattgtatactgactccgatggttgctttttaggtaaattagactagaccaattttaaagtaactgagaaatcgaccatgggtcgtttgactaagtaaaggggaaagtatagcaaggctatatcgtaaagactatgtgcggaatcgttggtgttgtaggaaatacaaatgctactgatattttgattcaaggacttgaaaaactcgaataccgaggctatgactctgcgggtgtttttctggctagtgaaggcaagagccaattggtgaaggccgtcggccgcattgcagaattgtcgtctaaggcagaaggtgtcgaagggacagctgggattggacatacccgttgggccactcatggaaaaccaactgaggacaatgcccacccacaccgctctgaaacaggtcgctttgttttggtccacaatggggtcattgaaaactaccttgaaatcaaggaagaatacctagcaggtcaccatttcaaggggcaaacagatacagaaatcgccgctcacttgatcggaaaatttgctgaagaagatggcttatctacgcttgaagccttcaaaaaagccctccacatcatccgtggggcctatgcttttgctttgatggatgcggaagatccaagcaccatctatgtagcaaaaaataaatcaccactcttgatcggtcttggcgatggctacaatatggtctgctcagatgccatggctatgattcgcgaaaccaaccaatacatggaaatccatgaccaagagttggtcattgtcaaggctgacagtgttgaagtgcaagactatgatggaaacgtcaaagaacgggctagctacacggctgaacttgacctttctgatattggaaaagggacttacccatactatatgctcaaagaaattgatgagcaaccaactgtcatgcgtaagttgatccaagcctatacagatgaatctggtcaagtagtggtagatccagctattatcaaggctgttcaagaagcggaccgcatctatatccttgcggctggtacctcttaccatgctggatttgcgtctaaaaaaatgttagaagagttgacagataccccagtagaactcggtatctcctctgagtggggctacggtatgccacttctcagcaagaaaccactcttcatctttatcagccaatctggtgaaacagccgatagccgccaagtgttggtcaaagccaatgaaatgggaattccaagcttgacagtgaccaatgttccaggttcaactctttcacgtgaagcagacatgaccatgttgctccatgctggtcctgaaattgcggtagcttctactaaggcttatacgtctcaaatcgcagcccttgcctttctggctaaagctgttggggaagccaatggcaatgagaaggccaaagcctttgatttggtgcacgaattgtctatcgttgcccaatcgatcgaatcaaccctttcagaaaaagaagtgatcgacgaaaaagttcgtggcttgttggaaacaacccgtaatgctttctatatcggacgtggccaagattactatgttgccatggaagctagtctgaaactaaaagaaatttcttacatccaatgtgaaggcttcgctgcgggtgagttgaaacacggtaccatcgctctgatcgaagagggtacaccggtcattgccctcttgtctgatccagtcctagccagccacacacgtgggaacatccaagaagtggcagcacgtggggctcatgttttaaccattgcagaagaaaatgtcgctaaagagacagatgatttagtcttgacggcggttcacccttatctatcaccaatctcaatggtggtgccaacccaattgattgcttactttgcaacccttcatcgtggactcgatgtcgacaaaccacggaaccttgctaagtctgtaacggttgaataaacttgtctatatagaaaaaacatcctcgttaggtttttcctaacgaggatatttgttttatttatcaaaaccttgcaaggctttgaggcgttcttctgtttgtcccttggcatctagttttttaccttggtagacagcagattcccatgatccatacattggatttgggaagatgatgaatttttcaccaaattctttttgcaattcgtctaatttcttgtcgcgatcagcttcagatgtcttagagaagtctgcaaagtcgaccaggttgtccccaaagagcaagacaagattggtcttttcttgcacagcttggcgacgaccttcttttgatttgacgccatcttctaagaacatgaggtggtcacgtccttgtaccggaatgccttctttttcaagattcttgatggtatcatctacttgagaggttgtacggtcagaaatatagtagatttgaaccccattttgatccgcatattgaagaaaatctttggcacctggtaccgcttttgcggctgcttttttcacccaaacatcccaatctttaggattgaaggccgtaccatctttgacgttttgaacttggtaagggctgttgtctaaaacagtttcatccaagtctaatacgattgagtatggcttatcagaaggcgtttggaggatctctttcaaacggtcagtagcgacattgtagccttgtaaatacaaagccttggtttctgctgccttttggtaccaaaggacagacatggtattttcttgtgagcgctgttgatcataggtcatcgtcacctgatttttagtgctgcttgcttttgtctcttgcgttttagtggtgttgcttccacaactcgtcagtaaaatgacagaagcaagagcagaaacgatggtaaaggtggtttttgttgttttcataaaccgtacactccttaaaattattctataaaaattatactcctttcaatcttgcctgacaagaaagagaagaaggtgtctaggaatcggtgaaaagaaaaaagaaggaaaaacgctgctatgaaaggtttcttcgcctcaacatatgctatattttcctttaaaagaagggatatagttttctgctataaccggatcaagaaaagatcaaagcatcccttttcttctaaaatgaaagaataaagaaagatacccgcaagtccctattttcaaggacttgcgtttttttgataccttttttaataaagaaattttaaggccttgatagggaaaatatattagtcagctacttttcgaggtgatatcatggttacaaattccagaaggaaagcagttagcctttctattggagaaatattgaggaggattcacagtatgagtaaaaaagaattggttcttcgtgccattcgaggcgaaacagtagaacgaatccctgtaggattttggctccattatgtgacccaagaagaaaaagaattgggtctagacaatccggctgtagtagcaaaaagtattaagggccaccaacactatgtagaagaaatttcacctgattttgtcaagatcatgagtgatggcttcttccgctatccgagtgctctttattcgagagagatcagatcgatccgagaattgaaggatattcaaccgattggagagcatcatccatggattgaaaaacaaatcgaggtggtcaaggaaatttgttctcatttccatgaagagattgcttctttctacaatatcttctcgcccatttcttatttgaaacgctggttccgtacggatcaatctcgtggagaccaagtgattgcagactttatcaaggaagatccagaaactttagctcatgtccttgacgtgattgcaggagacatcgctactttaagtcgtcgcttgatccaagaagcaggtattgaaggtatttacttttcaacccagcagatccaagatgagcgtgtgacagatgaagaataccgcaagttcattgagcctagcagcatcgctgtcctagaagcagccaatgaagctggaggcatcaatatccttcatatctgtggttttgaaggggccagcaatgaagtggagctcttcaaggattatccagctcaagtcattaactgggcgacccatcatgaaggccttagcctagccgcaggtcgtaaacttttcggcgatcgtgccgttttgggtggctttgtcaatggcaaaaaaggcttgctctatcaaggggaacgagaagctattgagcaagaaacgcgtcgcttggtggctgaagccggaagtcgtggtttgatccttggagcagactgtaccgtaccagatgatttccaattggaacgcttagattgggtgcgtcaagcagctgtattgtaagaagaaaggagagggagatgaaaaagatcagtggatggtgcatcctggtaaccgttttgtttttgcttttagggcttagtaaagtcgctcttgcaagtagtcaggggaaagcaaagaaagatccagatatggcaagactggagaaaattccagcccatagtctctccctccttcgcccgtctgatctagcaggaattcttcttctcgaagatcagtgataaaaaaagatgaagagcttgataaaaaatatatattagtcaaagcatcattgaagtgataagataacaaacaagaaaagatagaacgaggtaagaacatgtcatcaaaaagagaattagtgttaaaagctttcaaaggagaagcagttgaccgtgtgccagttggattttggcatcattttacaacagaagaagaatggttgaaaggattttctaatccggaaattattgaaaaaaacctcaatggccataaaaacttccttcacaaggtcaaaccagactttgtcaaactcatgagtgatggttactttgcttatccaaacccagccattcacaaaggccttgaaaatatctctgacttagcagggattgaaccactcggagcagatcatccatggatcacagagcaagtagagctggttaaaaaaatccgtgccggttttgaagaagacattgtggctatctacaatatctttgctccggtgacctacttcaaatggttggtcggagaagtttcaggaggagatgacttgatcgcaaacttcatcgatcaagatgcagcaactcttaaaaaagtattggatacaattggccaagacattgcaagtttgagccaacgaattattaaagaagcaggagcagacgggatctacctcagtattcaaagtatccaagatgcgcgagttacacaagaagtttataaaaacattattgcaccgagtgaactccatgtcttagaggcagccaatgaagccggtggcgtaaatattcttcatatctgtggctacgaaggagcccgcaatgatatccatctcttcacagactacccagcccaagtcattaactgggcagtcggaccagaaggcatcagcctagcagaaggacgcgaaatcttcggtggacgcacggttcttggtggttttgaaaatggcaaaaatggtcttctctacacaggagacaaggttgcgatccaagcagaaaccaaacgcatcatcgcagaaacaggaaccacaggcttggtcattggtgccgattgtacgattccaagtgacattgatgaagaacgaatcgaatgggttcgtgaagctgcagcagaataaggaaaatagaaaaagggagaacaaagtatgagtaaaaaaacatggattatcggtggggtggcagttcttgccattgcaggtgcaaccattcttggacggagcttgaaccatgcaaatgacagcaaaggctcgacaggatctaataaagtaacaaccttgaaagtagcccacactcaaaactatgtgccttatgatttcgttgatgaaaaaggagaatcagatggctatgaagtagccgttctcaaagccattgacgaaaaactaccggactacaagtttgagtacactggaacaagtgatgatgacctcttgatcggtctagaatctggtaaatacgatatcggaaccaaaggagcttggtataccgaagaacgtgccaagaaatttatcattccaaaagaaccaatcggagcaagtatcatcggatttaccatacgaaaagaagatgcggataaatacaagaacattgatgactttgctaaagaaaaaggaaaattggttccaatttcaccacaaaatgcacaatggaatgttattaaagaatacaatgaaaagcataaggaccaacaaatcgaattgacagctgcggaatctttcaaagtcgcagatgcctatgcttgggttcttgaaggacgttacgatgccttctttgacattaaactttcctttgaaaaagctgtcacagataaagatggttcttaccaccaatatgcggacaaactgagctggtttgcctacaaaggaattccaacttacccattgatccataaggataagaaaaacgaaaaatttgcggaagcctacagcaaggccatcaaagaattagaaaaagatggcacacttgctaaattgtcgaaaaaatatttcggtgaagatgtcttcagttatgtagataaagagaaataagatgaaactgggtgcgcatagccccagcttccttatttctatacggatacagaaaggaaaagaaacatggtctcatacgacatttccaaggtctggtcatttcttccaaccttggtccaagctctgccagcgaccctagctttgatggttttaacgacggttctcggttctgcatttggcttggttttgacctgggcacaagtatcagaagataaggtaggagcaggtctggcaaaaggttatgtctttactttgcgttgtacccctccgattgtcttgctctttttggtcttttatgggctcccccaatttttgaactggtggttgggcattgacattgaccactggtccaagtttgtctttgtccttgttgccatgtttcttctctttgccgctatgatctctgaggtcttcaaggcagcctatttggccattccaaaaggtcagatggaagcgggcttgagtatcggcttgacgccagctcaaaccatttggcggattgtccttccccaagcctttcgcgtggctcttccaaatatgacaactgccatcttgaacctcatgcgcgatgccgctttggcttataccattggctttatcgatatcatgggagcaggcaacaacttgatcagtcgcaatcttgggaattattccctcgagacctatacagctgtagcagtgatctactggggaattgcccttgtcatctccttctccgctcaactccttgagaaacgactcagtgtaacagaaaggtagcttatggatttcaattttattagtaaaacgtttctagccaccttgggtggtgtgccagtgacccttctgatcatggtcgtatcgattctcttgagtttttttccagccctctttttggcactcggccagatctataaggtcaaaggggttcgcagtttctcagtggtttacttagcttttatccgcgcgacgcctccgattctcttaattctcttcttttatagtctcttcccaagtctcttaaatagcttttttaagagcataggcagtcactttaatgtctttgagatcaatcccatttactatgcctttatcatttttagcttgatgacaacggggagtctggctgaaattctccggtcagctattctgacggtggataagggccagctagaagcagcgcaagctataggtttgaccaaccgccaagcctatatccgcattgtttttccacaagccctgcgtgcagcccttcccaatttgtgtaacttagttatcaatttggtcaaaggaacctcccttgtctttgtcatgacgatcaaggatatcaccgccattgccaaggtagaagcctcttatggctatcaatattttgaatcctatctagtgatttttattctttatattgtcatttgtggggtgattcagtggggattcaatctcttagaaaaacgcctgacactcgcatagaagaaggagaaataagaagatgttagaagtagaacacgtatcgaaaaaatttaaggaccaccaagtcctggtagatgttaatctcaaggtcaaccaaggagatgtcgtcgttattttggggccatctggatcaggaaaaacaaccttccttcgctgcctcaaccacttggaaaaggcagatacaggccacctcactttaggtggaaaagagtatgacctctcaaaactcagcaaaaaagagattctagaaatccgccaaaagacagcctttgtcttccagcattataatctctttgctaacaaaacagcgcttgaaaatatcttagaaggcttggttgtggctcggaagattccaaaagaagaagccatccaacgggcagaatcagcccttgaaaaagttggtctcctagcttataaggattactatccttctcaattgtcaggggggcagcagcaacggattggaatcgcgcgtgccatcgcagtgaaaccagacgtgatcttgctagacgagccgacttcagcgctagacccagagttggtcggtgacgtcttagatgtcatgaagcaattggcccaagaaggagtgaccatggttgtcgtaacccatgagatgggctttgcgcgtgatgtggctaaccacgttatctttatggatggcggacacatcatcgaagaaaacgaacctcatgaattcttcaacagtccaaaagaagaacgaaccaaacaattcctttcacggattttatccgatgccacttatagcgtcgaatatatgatttaacaggagacacacccagtaagggtgtgttttttaggatctggaaaaaatttttaaaaattggctcattttttaaaaatcattacgaataatataagtgagagggaaatatgactgataaaaaacaacgatttgtactactattcttactgactttgtttctaggaggttgcggcctttttacggataaagctgctgagagaagggaaatgattcagatcgcagagagtacgaaaatggagcgagcgataaaacacttgttaatcagtatcgatccgaaagctttcacttcagaagggatcattcactcctataccctgataaaaggtgaattggaatacaatccaatgggagggatgaatgtcactctcgttatcaatggcgataaagagttaacgatcgatacgactgttcaaatggaagattcaggacagttcgaagcaggtagttacggtatttcagcaaaattagatgatctgttaagtaaagcagaagagactgggaaataaactcattcaggtaaatacccctaatataggaaaatagaaacatttctgaatcaaagttggtatgttacatcaatagctagtgcttgtaacgatttggcaacattttttaacaaaagtaacatttcagacgttgatggaattttgtataataaattttaagaaaactagagaaagaaatgggaagaaatgaaaaaaagtaaattaattgtgttgataatggtagtatttagcctgagcttaggaggatgtagcttttttaatggacaatctaccaagaaacaagaaatgattcaaatcgcagagagtaagaagatgaaagtggcgattgaaaatatgttaaaggatattgatcctgaagcattaactccgcaggggaaaatacactcgtataaaatcttggaaaatcaattggaatacaatccaatgggtgggatgaatgtatatttggaagtcaataatgatgaaaaactaactattgatactactgttcatatggaagattcgggagaatttgaggctggaagttatggtatttctgcagagttaagtcgtttactgaggggagatgaatatggtaaataacacaaatttttcagacagacagcatgtagaagcatcattaattgaatatagatcattaaaattaggaaaaaatcaaaaaattaaagaaggtagtgaatatgttggcaatgtttctcacatctatgatagtgtaaatggcaatgaagaacaagtcttcgtactaacggatagtggcaagggtgttgaacaagatccggtcccctatactgcttcagatgaagaacgtgcccaaatccatgacgtgactgtcttgatgaagggatctgaaactgaaataagtacacaaaaattactccatgatacatatacggattgggtaaagacagatttgccagcagcttccaatattttgaaccctggtggtgcgagcgagtatgcaacagaatatgcgaagaattatgcgcgagataaggctaaggatagttttaataattttgtagaagcttttgaagatgcgattattcctacttctgttaatcttcctccggaggccacacccttaggtaggtttatgaaaaaagcgctggataatcctgtcagcaatttcgtacaggaaaaagcatcagatgtggtcggcttttttgcagaaagaacagccgaagaacaagttaaatttcctgctttagtgggagctgcttttttaaaaaaatacaatgatgaaaacgggactttcccgcctccgcagtttaaagatgctgcagctcatttgaaagaggtgatccgaaaatatcccaatgccaagatagatctatacggtcactctctggggtctatgaatattcagtatgcgcttgcctgtttgacggaagaggaagcttctcatattgggactgtccatctatacaatggccctaatgcctatcctatcttaacacccgagcaaaaagcgcgtatagattcgctgaagtacaaaatttacaaccacattgaccataaagatttggttagcttgggctatcaggattctggaagcaaggaatccagtgggattgtcaagcacctcaaaactaagaatttgataaatactggcctgcagcacatgatgcatggttatatctatgataaggatgggaatttggttcttgaaaagggaacggaagccatcactcgcaaggaaatcattgaagagcggatgaaggtttactatcgcctaaaggataaattacaaaaaacaggtgatggactgagttcaagtgaacaaatctatctcgatgccttgcaggcacgcttggcttctgatgagctgattcgagtagtggatgaagggctggagcaagctcagaaatctaaggcacgactggatacagatttagaagctttggagaaagtattacagaccgttccgaaaggcttcattctcaatcttgccgaagtagaagaggcctatgcacaggctggtgcaacaaggcaaacagttgtcactcaagtaagagaaagattcgacaaccgtttggctgcatatcagtccttatcgaatgaattccatgctttaaacaagcaagtgaatgcaggaattgagctcttaaaaacaaaagatcaagaaatagcaggagaaatgaaccagtgggaacaactagcttattaatttcatctactctttcgaaaaaggaaaagaaactagatcacttggaaagagagtttcaaaaagcgcgtttggagctagatgaaaagcgttgcctagtggaaagaaaacagcagctcttcacccagatgctggaagaagagtatgcgatggcagcttccttcttacaagagcaggaggttgatgtcaattgtggatgggagtccctccatcgctgtatcgaagagtatgatctcgaagctagagaagctgcacaagtagccttaaaacagatcgaaatcgaggaagagaatttatggcaatcctaccggaaagatagacgccaactggaagaggagtttgcacaagataaagtttcatagtatagaagaggaggaagtatgggtgatagtccagtcaaagatttctttgatttagatatgaaagataaaatgaggatcatcgaaagccgaaagaaacttgaaaaagatttaatccgtgttgtctatgcgcctgttttattgacctgcaaggcaggagttgagaagcgttacaatgaggaattgactgcgattgcaacagtagccgaagaagacgtccaggtagttggaaaacaactggatcagtccatggtggggcaatttgctaaaaatgtacagacagttattcaagaaaaagctgggaaatttaaatctatctagccaagaacttctatttaaaatggaatctggagtgactccagatttttttaataaatttaaaaaattatgtaaaaaagtgttgacaaataattcagtctgcgttataataatttatgtaaacaaaaagaggttgaaaaaacctactggtttacaagatcaatagtggaaaggagatggtgatatgctatttccaaaattaagacaactaattgataaaaggggaaatagaaactgttagcctgtagggctattattaaataaatgaattaaaattatgtaaacaattaagcagcagccaattggtctgctaattttcaagaatgaattaaaattatgtaaattagaggtatacaatatgaataacaactttaacaatatggatgatcttttcaatcaactaatgggaaacatgggtggttttcgttctgaaagccgtcgctacatgatcaacggtcgtgaagtgacaccagaagaattcgctatttaccgccaaactggtcaacttccaaatgaaggaagtgagcaagtgcaacaccatcaaggtaaaggaatgaaacaagatgggatccttgcaaaacttggtcgtaacttgaccgaagaagctcgtgaaggaaaattggatccggtcatcggacgtaataaagaaattcaagaaactgctgaaatcttgtctcgtcgtaccaagaacaaccctgtccttgtaggggatgccggtgttggtaaaacagcagttgtagaaggtttggcacaagctattgtgaacggggatgttccagcggctatcaaaaacaaagaaatcatctcgattgatatttctggtctagaagctggtacgcaataccgtggtagctttgaagaaaatattcaaaatctgatccaagaagtcaaggctatgggaaatgtcattctcttctttgatgaaatccatcaaatccttggtgcaggcagcacaggtgatggtcaaggatctaaaggtcttgcggatatcatcaaacctgctctttcacgtggggaattgactgtcattggtgcaaccactcaagatgaatatcgtaacaccatcttgaagaatgcggctcttgctcgtcgtttcaacgaagtgaaagtcaatgctccatcagctgaagatactttcaagattctccaagggatccgtgatctttatgaaaaacaccacaatgtcatcttgccagatgaagttttgaaagcagcagttgattattcgatccaatacattccacaacgtagcttgcctgataaggccattgacttggtcgatgtgacagctgctcacttggcagcccaacatcctgtaacagatgttcatgctgtggaacatgaaattgaagaagaaaaaaccaaacaagaagaagctgcggctaaagaagattacgaagcagctttgaaagcaaaagttcgtatcgaagaacttgaaaagaaaattgaaaaccatacggaagaccataaagtaacagcaacaatcaacgatgtggctgaatcagtagaacggatgacgggtattccagtgtctcaaatgggtgcaactgatattgaacgtttgaaagatatgggtcaccgcttgcaaactaaggttatcggtcaagataaagccgttgaagcagtggcacgtgctatccgtcggaaccgtgcaggatttgacgaagggaaccgtccaatcggtagcttcctctttgtaggtcctactggtgtcggtaagactgaattggctaaacaattggcgcttgatatgttcggaaccaaagatgctatcatccgtttggatatgtcagaatacagcgaccgcacagccgtttctaaattgattggtacaacagctggttatgttggttacgatgacaacagcaataccttgacagaacgtgttcgccgtaacccttactctatcgtccttcttgacgaaattgaaaaggcggatcctcaagtgatcacccttctccttcaagttttggatgatggtcgtttgacagatggtcaagggaacacggtcaacttcaaaaatactgtgattatcgccacttcaaacgctggatttggttacgaagctaacttgacagaagatgcggataaaccagaactcatggatcgtttgaaaccttacttccgtccagaattcctcaaccgtttcaacgctgtcattgaattctcacacttgagcaaggaagacctttctaagattgttgatttgatgttggtagatgtcaataagaccctttctaagaaagaaatcgacttggcagtgagcgatgcagctaaagaatacatgactgaagaaggttatgatgaagtgatgggtgttcgtccactccgtcgggtagttgaacaacaaatccgtgacaaagtcacagacttccacttggataacttggatgccaaacatctcgaagcagacatggaagatggtgtccttgtgatcagagaaaaagacacaaagaaggaagaaaacgctgataaacaagcagattaaggcgaattagtttgtgaaaaatagagactgctatcatatagcagtctttattttttcttcccacctgggggaaattattcgccgtataaggccaaaatcctcctatttggggtaaaaaaacatcaataattagtgaaattaatccaatttgagcaaaattattaataaataaagaaaataagtatataatctatacaagaataaaatttgaggaatggaagtaagatgagcaatacaattgatatctactcaactcccgaatacagaaaagtggaagccgttgttcaactgatggttgacggtcgcttgacgagctatcgtgtcgcaactgaaacaaacatcagcaaaatgagcttagcgactttgacgaagggaacgagtaaaatcaaaaatattacctatcaaacggctttggccttgattgattggtatgatgagaatcatgaaaagtatggcattacgattgactagtcagtagcccacttttcgtggtttttttctttttcatcaaaacttgcctcctctctaatactggagtctgattttacttgaagaggatgggaaaacttgaaaagacgggcgaaatttgatatagtatagcatatatgaaaattaaaggagaaacatatgcaaggcggaagtttgctaattatgctcgttcttatggtcggtttgatgtacttcatgagccgtagccaaaagaaacagtatcaaaaacggatggaaagtttgaataaacttcaaaaaggaaatgaagtcatcacgattggtggcttgtacggaaccatcgatgaagtcgatacagatcgcaagaccgttgtcttggatgttgatggtgtctacctgacctttgaattgggagcgatcaaaacagttcttcctgtatcagaaggaatctcagccactgctacagaaggtgctagctcagatgccgattcagccatcgaagaataatcatcaaagaagaggcaagggcctcttttttggtgggcaaataggacgatgtgatgaaggaaagccttgctggttcaaaaaagaggccagagtccctattttatggggatttatggtataatgaagcgataaatattgaaataggtagaaaaacatgtttcgttttaagaaaaaagaaaaaatcgagatacctttagaagtcccgaaacacattgggatcattatggatggcaatggtcgctgggcgaaaaagcggatgcaaccgcgcgtcttcggtcataaggcagggatggaagctctccaagaagtgaccattgcagcaaaaaatatgggggttcaggtcctgactgtctatgccttttcgaccgaaaactggacacgccctgaagatgaagtcaagttcatcatgcacttgccggtcgagttttatgatcgtttcgtccccgaattgcatcgcaacaatgtcaagattcaaatgatcggtgataccaagaaattacccaaagaaacgctggaggctttggaaagagcagaagcgatgacccatctcaatacaggcttgatcctgaatttcgcactcaattatggtggacgtgctgagatcactcaggccgtgaagcagatcgcccaagaagtattggatgcgaagttcagtccagaagatatcacagaagagatgatcgcagattctctctataccgagagtttgccacgcgtcctaagggatccggatttgattattcgtaccagcggagagatccgtttgagtaatttccttccttggcaggctgcttacagtgagttgtatttcacagatgtgatgtggccagattttggagaggaagcactacgaagtgccatagtagaatatagccatcgccatcggagatttggtggtgtttaggagaagatgatgacaaaagatttacaaaaacgtgtgatttttggaggaattgccctgctctttttcattccaacagtaatggttggaggggtgttcttccagattgtgattggcttgatcgccatgcttggggttcatgaattgctcaagatgaagggacttgagacagcgacttttgaaggagcgctagccatgttggcggccttcgtcttgactttgccgattgaggactacctcccttaccttccagcagatggcaatatgattgcctatggtttggttgtcttgattctcatggggacaactgttcttgctcagaattacaattatgaagatgtggtctaccccattgcgtctagcttttatgttggacttggtttccattccttagtagatgcgcgaatcgctggtattgataaggtcttattggcactctttattgtctgggctacagattcaggtgcttatctggtaggaagtcggtttgggaaacgcaagcttatgcctgcggtttctcctaataaaacgattgaaggcagtcttgggggaatcttgtctgcagttgcggtaactgtgatctatatgatcgtggatcgttctgtggcgggtggacatggttttcttgcgatgatcttctttaccatcctctttagtattgcaggtcagtttggagatctggtagagagtgcgattaaacgccacttcggtgtgaaagattctgggaaatttattccaggacatggtggtgttctagaccgctttgatagtttgatttttgtctttcccttgatgcatttcttgggcttgttctaagacagaagagatagaaaggaaaccacgtatagaacgatgcagtttattgcctttattgttatttttggagtgatcgttctcgttcacgagtttggtcatttctattttgcaaaaaaatcgggcatcctggtgcgagaattctcgatcgggatgggtccaaagatctttgcccatattggtcaagatggaacagcctatacgattcgcattctacctttaggtggctatgtgcgtatggctggctggggtgaagatacaactgagattaaaaccggaacgcctgtcagcttgacgctaaatgaggctggcaaggtcgtccggatcaatctttcgggaaagaatctggatcagacagcccttcccatgaatgttacccagtttgactttgaagacaaactagaaattactggcttggttctcgatgagaccaagacttatgatgtcgatcatgatgcgaccatcgttgaggaagatgggacagaggtgcggattgcaccgagagatgttcagtatcagaatgccagcatttggggacggttgatcaccaactttgcgggtcctatgaacaactttatcctcagtattgtcgtctactcacttttagcctttatgcgcggtggtgcgattgactactacagcaacaatgttcaggtggcacccgatggggcgctggctaaggtcggtgtcaaaagcaatgttcagatccttcaagtcaacaacgataccgttagcaactgggatgagctgacagatgctgtcgaaaaagcaaccaaggacagcaagacggctcctgaattgaccctgaaagtcaaaacagacggccaagaaaaagaagtcaaagtgaagccaaccaagtcagggaatcgttactatttgggtgtgacaaatggcctcaagacaggatttatggataaactcttgtctggttttacagatacctggaatacagcgacacggattttaggagctttgaaagatatcattttccactttagtctcaataaactgggtggtccggttgctatctacaatgccagctcacaagctgctcaattaggaattccggcagtcttgtctcttatggccatgctctctattaatattgggatcttcaatctaatcccgattccggctttggatggtgggaaaatcttgatcaatttgatcgaggtcgtccggagaaagccactgaaacaggaagtagaaacctacatgacgcttgcaggtgtagctgtaatggttattttgatgattgctgtcacctggaatgatattatgaaattatttttgaaatagaaaaggatattgtccatgaaacaaagtaaaatgttgattccaacgcttcgcgaaatgccaagcgatgctcaagtcattagccatgctttgatgttgcgtgcaggttatgttcgccaagtatcagctggtgtctattcgtatttgccactagctaatcgagtgattgaaaaagcaaaaggcatcatgcgccaagaattcgaaaaaattggagcagttgaaatgcttgctccagcccttttgagtgcggatctctggcgtgaatctggtcgttacgaaacttacggggaagacctctataagttgaaaaaccgtgaaggttctgactttatcttaggtccaactcacgaagaaacctttaccgctattgtgcgcgactcagtaaaatcttacaaacaattgccgttgaatctctaccaaattcaaccaaaataccgcgatgaaaaacgcccacggaacggtcttcttcggacccgtgagttcatcatgaaagacggttatagcttccatgctaactacgatagcttagatgtcacttatgatgaatacaaggcagcttatgagcggatcttcacccgcagtggcatcgactacaaagccatcatcggtgatggtggtgccatgggcggaaaagatagccaagagtttatggctgttacgcctgctcgtacagacttggatcgttgggttgttttagacaaatcagtggcttcctttgatgagatcccagcagaagtccaagaagaaatcaaagcagaattgctcaaatggatggtctctggtgaagataccattgcctattcaagtgaatcaacctatgctgcgaacttggaaatggctactaatgaatacaagccaagtaaccgtgttgtagcagaagaagaagtgaaacgcgtagaaacaccaggtgtcaaatcgattgatgaagtagctgcattcttgaatgttccagaagaagctactatcaagactttggtttacatcgcagatggtgagcctgttgttgcccttctcgtaggtaatgatcagctcaatgaagtgaagttgaaaaaccacctcggcgcagacttctttgaacctgcaaccgaagtggaagtgaaagaattattaggagctgattttggctctctcggtccagttgatcttcctgaaaatgttaagattatcgcagaccgcaaggtccaagacagccgtaatgcagtagtcggtgccaatgaaacaggctaccacttgactggtgtcaacccaggacgtgactttactgcagaatacgtcgatatccgtgaagttcgtgaaggcgaaatctcaccagatgggaaaggggtcttgaactttgcacgtgggatcgaaatcggtcacattttcaaactcggcacacgctactcagctagcatgggagcagatgtcttggacgaaaacggtcgtgcagttccaatcatcatgggctgctacggaatcggtgtcagccgtcttctttcagccgttatggaacaacatgctcgcctctttgtcaataagactccaaaaggggagtaccgttacgcttggggaattaactttcctaaagaattggcgccatttgatgtgcatttgattccagtcaatgtcaaggatgaagcgagtcttgctttgaccgatcggatcgaagaagccttggtgaataaaggctacgaagtcttggtggatgaccgaaatgaacgcgctggtgtcaaattcagcgatagtgatttgattggacttccaatccgcgtaacagttggtaagaaagcagctgaaggcatcgttgaagtgaaaatcaaagcgacaggagataccatcgaagttcatgcagacaatctccttgaaaccctttcaatcttgaacaaataagaaaaagctttctgagctctcaccagtgtggtgatgaaactcaggaagctctgtttatttttcttctttgaggccttgatctttgaaataggtaaagagatcttgaggtttgccattgaggtatttcttgaactcagctgtttcttcctccccttgatccccgtagatggaagcaaactcatctttcttgatttttgagaagtcagcttgtaagaccttggcataggattgtttatctttcgaaatttgaatgcggaagctaagaccaggcttgccatttaagcttttatagatatcgctatgttctaattcttcttggtagatttcctttaactcggaaagatccatgtcttgcaaatctgaggaaatgggttcaaaactaagaaaagtaaaagagacaatttcatcttttttgtagccgatttgaattttgttttgatggtgatcgttaagttctgtggagaaagttttggttcgaacgttctcttctttttcttttttcacttgggaagtgctttggctagatgttgttgaagcttttcctttttctgcttggccttggctacatgcagtgagagctaggaggcagatagaggtcaataatatttttttcatagaaactccttataggttaatggtgttcgatcttgtatgaaacaagttttgaacaggtttcattataccataaaagttttaaaaatgaaaaaatatacaaaaatcttcaaaatttgcttttaaaaacacctaaaatcaacaattttaatctatgtgtcgagttaatatgaaaggacagagtgtcttcttttatttccggaaataatactagttggagactactggggcaaggaattcagaaaatatattacatgtttatgacaaagtgttacacaattgtaacaaagttacaatgttttatcagttagccctctaaacttgacattctggcaatatttcattaagatatttttaagtaaataatacaaaaagggagcaaaaggtaaaatatacagttatctggcattttactaattcgtactaaaatgtattgtttatggaaaaaatataagggtatcagcccaaaaggagaaacatatggctcaaattaaattaactccagaagaactacgtcaatcagcacaacgctatgcacaaggttctcaagaaatcgatcaaatccttaacactttgactcatgaacaacaagtcatcgacgcaaactgggatggatctgcatttgatagctttgaagcacaattcaacgaattgtctccaaaaatcaaacaattcgctcaattgttggaagacatcaacgctcaattgatcaaagtcgctgatatcgttgaacaaactgaccaagatatcgctgcacaaatccactaagatagtcttggaggtgatcttacttcttgtaggtagatcacccttttgtcttttgatatatagaaaataggggttagattcttaattcctaacccctattttgtatctatgaattagaaaaaggaaaaggtatggaagttaaaaataaaaaatggttaaaatacatcggtcagagtgcggttgtgctccttttgatgggatctgtagtgggtctttatacgacggttcaaaagaaccaaaagcaaaacgaagcaaagaccgtgcaaacgacagaaaacactaagctcaacattgcggttgtcaatgaagacaaggcggtcaaactgaatgataaagaatacaaccttggggctagctatgtaaagaatatcgaacgggataattcgcaaaactggtctatactccctcgtggagccgctgagtcagggcttgcagatggcaagtaccagttgatgattgtcattccaagtgacttttcagagaaggtcttggaagtgaacgtggttaatgcagagaagaccacggtgacgtataaggtcaatgcggctgggaattctcaggttgaaaacgaggccaataaagtcgctaaagatatcgtttcagacttgaatagccagttggttgatatgtatatggttagcattttgagcaacctttatacagctcagaagaacgtggaaacaagtaacaaaatccaatcgaccaacattggttcataccgaagcaacttgctggattcggccttggattccaagaatatctttccaagtctctatagcttgtctacgtcttctgtcgagtcgaataatgccttgaagacagtccttgagtcttatacacaggcttttgatcaattgacccaatctcaggatcagtacggtcaaaacttcgacacattgatcaagcaacgctctgaggataagatcagccatgaagagttcatgaaccagctgatgtctatgaaccagtctgttatcagtgaaaagacccaagagttgtataagaatctacaacaaaaccaagaagcaattaccaaacaattgagtcaaccaactgaaacagaaggagatgcttcagggaccaagacctatgcaggcttgacaaaagatgtgaatgatcgtgtggcagacctcgaaaaagggatcaaggcagaacgcgacaaattagatgagcacgaaaagaacatcgagtcttctgtaaaaacgaagatccttgactactatggtctaaaagaaggagacaaagtcactcttcgtaccttgcttggaaaaccaaaaatcgaaactatcagcaaggctcgagataaagcggatgatgacattcgtcaagcgattgaaaaacttccgtctttagaccctgctagtctgaatttgaataagtatgggaatctcaacgcagcgattaattttgatagtgcttttgctggtacgaaggggcaggcaaaagggaatgccgatgaattaaaacgattggctacagaagtggatgccaaatcaacggcagttgcggatgtccttaatgctaaatctgggaaacagaaagttagtattcatgtccctgcaggagtcaaggttgatacttggacctatgatggacagacttatgcaggtggtggtgagcaggaagtcgaactgaaagatggcaaacaaattcaaattcacctcgttgaagatggaggagctatgccaagcgcgattgatgttgaagttcttgtgaatggagtttcttcaaccagtgtgaccgtatctgcagatgatttgaaaacagctgtagctaactatgcatcgaaagctagtgaaatcgccctggattatcaacgtgcgggagcattgatcgatgcctactatccaaaagatgacaagggagatcgtcattcgctctatgatccgatcgaagatatggatttgacaaatgctttggtcgatgtcgtgaaggctgccgtttcaagtaacatgaaggactaccgtaagagtattgaaacggatgaatctggggatgcaacgaagagtgtgaaagcccagttagatggtacactccaacagttgcaagacttgggaccacaattgcaggccaatcttcaagcaatcgaaaatactaacaaagatctaacccaaaatatcaacgatcaattggcacagtatgcagaccttcaaaaacgcttagaagctatctcatctgcacaagaaacagtgacacaggctcaaaccaagaccgatgcagatttgtcagcccttggttctgaatacacgtcattattgagctcgacagaaggcgttaagagctcatctcgtagcaatgtagaagctgctaactctaccaatgaaatctttagccaattgaataaagaattggaaaaagctcaaggcaatacagagaaattgtctagcaatgcagagagcttgatgggtgaattcgacaaggaattgtctgaaaacgggaacttcgtcgaagccttccgtaaagtcttcaacaatgcctatgaaaacggagtaccaaatgaagtcctgctcgactttttgtcaaatccagttgcagagaaatcgtcttctgtgaaagcgactatcaacgtctaccgtccatttatctggatctttatgttggaagtcttgagcctcttcacagcttatctctttgcgactcaaccaatcattcgcaaggttaaggatcgtttcaaactcgatcgtttgcaagaatcagatctcttgtctgtcggtgttcttgtgggactttctctcatccttggactggtgatcggaatgatttcaagtattcaactctctgttggtcgtgaatatgtaccttcatgggtattcttagcggttctagcaagctttgtcttggtacaactgcaataccttctcttgaaacacttccgtgtgattggaatgggactggccttcttcatgttgatcagctatgtctacctatcaagtgcgatcggaacgaccgcgaccttgtcaggccttccagcactggtgaaaaatgtcaacctcctttctattttagaaggacagtttgcgggttactttgatggacaaacagccggtatcggcgtcttcttcggattgttggtcttcttcggccttttgacagttgccaatatcttcattcctaagaagtttactcaaacaaaggaaattgaatcaagcttatgaaaaaaatgatgtatcttctctttgtctttagtctcttaccagtagctgttgtttctgcagatgattttattgataatcgtctgcaggtcaacaactcacgtcttgagacagagcaggaaaagacacttgggggccaattggatgcgactgagtctcttttcaatgagaaggatcagaaaaaattagcagatgaaaaacgcaagcaagagaaacaattgaccgattctgacggccagttgttttctgctataaagggaaagaaaaaaacagggcctgaagcggacctgttccagcctgaaaatcaaaaattatctaaattcgagtccaatgtggaggacaattcggccagcttgtcggattttattccagccttgcaaatgctggcttggagtgctcttctctttgggattgctggctatatttcctatcgaatctatagaaaagaggcctaaatggaccaacatatcaatgtcaccttccgtatgaatggtgcaagccatgacctccgaatcccaacgcggatggaggtgcgacgcttgattcgggaattggatcagatctttgggtctgccatggagcctagaagcaagtatcagttgcgcgtggtaaataaaggcatcttgctggatgaaggcaaggtggtacaggagtatccgatcacgagtggtgatctgatcgagattgaggagtggtaaggtgaaagaagaacaatttacactggaagaacaagtcttccgttttgaaaaagaagaaacgagctggcggctggaccttaagcgttcagaagtggatagccaggatttacgcaatttatggattttggatctccatcatcccttgtttttagagcaaagcatgacagcggatcaagaccagattcatctgacctatcagacagacgcgctaggcttgagtgcagaagaaatccaggcattaccggtttcagaccgtctgcgtctagctatcaatgtcttggatttggcgccagccttggagcttccggtgacctttatgttgcatcctatcaatttgtttgtgaccaaggatgcgcaagtcaagatcgcttatcgcggggtgccgggaatgatggtgccacgcaagtgggatcaggttgaattcttgcggcaggccaagtgctatgcggtcactctttttggggactgggatttcatggagctctatcaaggcacacttgaattagaagatctgcctgatttcttggtagaaatccgtgatgctgctagcttagaagagatgaaagctctcttagagaaagcctaccaagaacgcaaggaagaggaagaaaagaccttgaccttggtttcaagtcgtcaacaccgaatctttaagttggcaacagtatggctttcagctgtagtggccctcttactcttgcccttgatttatttggtctttttccaagccccctttaaagaaaagttgcttcaagcggatactgcttttcttaaagtagactacaccggtgtgatcgatgagttggagggagtggctccaagcagtcttccaacgacacagaaatacgagttggcgacgtcttacttgcaaggcttgaatttctcagaggaccaaaagaaggtcatcctcaacaacgtcacgctcaaatcagacagtctctatctccactactggatctatatcggccgtcatgactttacccaagcgctggatacagccaagcggatcgacgattcagacttgatcatctatgcccttcgtaaagaaatcaaggcgacacgtgatagcgaaaaactctctggtgaacagcgcgagaagaaactctctgagctagagggcgaatacaagaaatactgggatgcccgctctaaactcttggaagcagagacagatgaaaccaaagcttccactagcagctcaacaacggcttcgtctacagaaggttcctcaacagaaagctcgtcttctacaactgcaagctcgactgagtctagcgaccacaaggagtagtctatgaaaaaacgtatcatactctataaaaaaggttttcgctatgagctagcgctagaagagggaaaaacagcgactgtatcgaatcaagaaacggctcagttgaccatttcttcgcaagaacatcctcttcatttccaatggagtcaaggagaagtcttctaccaatatggggaagacaagggcgtgcttgaaaatagcaagatccttggagatgtggtctgctacttggcgataggggaagtccatacctatgagctactcgacaaggaagagatcctggtagcagatgaagagggtgcggatgtgcgcgtgcattatccagtgcgctttctccttgtgaaaaaagaccagatctggacttgccagctcttatctggaaaactctaccataaccacaaactcgtcagtgaagcgacttttccactggcctttggggatgagcttgctattggagatgtgacctttaagctctatccggaagaattttgtgtggaagggactgtcgaagtgagtccttatctggtgccgcgtttgcattcacgctatgacttctacaaggactatccagagtaccaccggtctccgcggatcatctaccggagttcggaagacaagatcttgatcaatcctccaggagcggagcctcaaaagccatcggatgaactcttgaagttgatcatgccacccctcatcatggttggggtgaccctcttgatcaccattttccaaccgcggggtctctatatcatcgcgacggtatccatgtctgtggtcagtgtgatcttttcggtccaaggcttcttcaagaatcgtaagaaatacaaagaagacaagaaagagcgcgtggagctctaccatctctatctcaaggacaaggctaaggacttggaacagctatctcggaagcagcgagaaggcatgttttaccatttcccagcgattgaagacttgacaaagatggtcaaacgctatgattcgcggatctacgaaaaaacaccgcttcattttgattttttggcctatcgtttgggcttgggcaaggttccaaccagctatgagctcaaatatggtcaggaagagcgcagtgggaagaaagatgccttggaagaagaaggctatgcccttttccaagctcaccaaaaaatcgacaatcttccgattgtagctagccttaatcggggacctgtagggtatgtcggtcctcgtcctatcgtgttagagcagttgcaactcctggttgcccaattggctgtctttcactcttaccatgatctgaccattattccgatcattccagaagaggaaaaagaaagctgggattggatgcgctggttacctcatgcaactctgcaagatatgaatgtccgtagctttgtctacaatcagcggacacgcgatcaggtcttgaacagtcttaaccaaatcctcaagctccgcaaggcgcaaaaagaggaagaaaaagccaatgataccaagatcttccacccgcactatgtggtcctcatcaccgatgaaaccttgattttggaccatgtcatcatggagttcttccgtgaggatccgacagagctaggatgctctatcatctatgtggcagatgtgctctcatctctttctgaaaatatccaaaccgttatctccatcaaggaccgcaaccaagggcaattgctcttgcaagaaggggttcttcgtgagcttgacttccaattggatcacttccctgaaggttatgacaaggaagccatctcgcgtggccttgcccctctcaagcatatccaacagcttaagagttcaattccagactcggtgaccttccttgaaatgtaccaggcggaaacttttaatgacctcaaggtcttgagtcgttgggagagccatgccccttaccaaagtttggcagtgccgattggtctgcgcgggaaggacgatttggtctacctcaatctccatgaaaaagcccatggaccacacggtttgattgcagggacaaccggttctggtaagtctgaaaccattcagtcttatatcctgagccttgccgtcaacttccacccacacgatgtggctttcctcctcatcgactacaagggtgggggaatggccaacctcttcaaggatctgcctcacttgcttgggaccatcaccaacttggatggcgcccagtccatgcgggccctagcctctatcaatgcggagatccatcgtcgggaacgcctctttggtcaatatggggtcaaccatatcaaccaataccaaaagaaatttaaactgggtgaagcgacagaaccgcttcctcacctcttcttgatcagtgatgagttcgccgaactcaaggtcaaccaaccagacttcatcaaggaattggtctctatcgcacgtgtcgggcgttccctcggggtgcacttgatccttgcgacgcaaaaaccttctggggtcgtggatgaccagatctggtccaactcccgcttcaagctagccctcaaggtggcagatcgtggggactctatggagatgctgcggacggcagatgcggctgagatcacccagaccggtcgtgcctacctccaagtcggaaataacgaagtctatgaactcttccaaaccgcttggtcaggagcagactaccagcctgagaaggaccagctagggatcgaagaccataccatctacttgatcaatgaactgggccaatacgaagtcctcaaccaagacctctctggtctggatatggcagaagaaatcaaggaagtgccgacagagctggatgtcatcgttcaagaaatcaaccacttgcaccaacaagaaggcatcgcagctgtggcccaaccatggttgccaccgctcaaagagcggatcacgctggatgagttggacaaggtcgtaccgatcgaggcttggcaaaaacggacagctccaagcgtcctgatcggggtcgctgatatcccgcaagcgcaaaagcaagaagcggtcgccatcgatctgtcaaaagatgggaatatcctcctttacggaagtccaggcacaggaaagaccactttcctacagacagccgcaatggatctggctcgcaagcagagtccagaaaatctgaccatgtacttgctggatttcggaaccaatggtctggcaccattgagccaattgccacatgtggccgatagcctcttgctggatcagacggagaaaatccagaaattcatccggatcatcaaccgcgagttggatcgccgcaagaagctcctctctgagcatggtgtcggcactatcgctctctaccgtgaagtgaccggcaagcaagagccaaccatggtcatcctcatggatagctatgagtctatgaaggacgagccttatgagacagacctcttcaagctcttcatgcggatctcccgtgaaggtctcagcatcggtgtgcacttgatcatcacagctagccgtcagaacaacctacgggctcagctctattcaaacttcaagcaccagctgaccttgccacagaatgatatctctgaagtccgcggtatcgtgggagcaaccccactagcgtctacgatggaagacatcaagggacgcgcgctcatgaagcgtgacgaagtcgatgtcatccagttcgccctaccagtcgcaggagacaatgatatccaaatcatcaacaacctccgcgaccaagttcaaagcctcagagagatgtggacgggtcgcaccccagcaggcatcccaatggtaccagatgagttgacagaagcagctttctacggacgtgaggatgtgaaagagtccatggaaaatctagaatttccaattggacttgactttgaaatggtcaaaacggtcaagattccatttgatcgcttgaaaaatctggtatttatggcggactctccagaatcactggaaaatcagcaaaaacatttgttaaatacagcacttcaatttggatcaaaattacatattatgctggtggatcctttagaagaatgtgttgcttataaggataaagtttctacttatattagtagtagtcaagaaatttctgaaattgccaaacaattaatctatgaggttgatcgtcgtctagaaaaagatctgtattcagattggttgatcatgatgccaactattaaggcaattgttgatcaaggacttacagaaaaagatctacgctatctatttgataatggaccacgagttggtatgcactttgtaataggaagtgaatatgcctatcttggaaataacatcaatgaagtaccgaaatatctcaaaggaaatgctcaatggtttatgatcggtatgagattgatggatcaaatgttcctagataagccttataataatcgagaagcgcgtcttgcttcagatgaaatctacttgcatgatcgcaagcaagctattaaacttaaaatcaccaagaatggatagggaggtaactatatgacaccaatacagagtagagaagaagtcgcaagttctatcgcttcaggaatagcgagtgcggcaggaagtataacatcagctgataccgtcacattagatggatcgagtgagtatccaggaaatagtacagctgcagaaaaaattccagaggaagccaactatgcagcctcaattagtggtgtgctaaatgattttgtagaattgattcatggagttgcggcagaatttgtagccatggatagtaatattgcgtccaacatcgatgccaatacatctaatttaccagaaaccagtgcagctcctggtgagagcggagagtttgtaccaaattcaggatattttgcggaataatgaaaccaatcaccttagaagagatcgataaaaagaagaaaaacattgctcaatcgctcgatcaactgaacctagaaaaaaggaaagtggaacgagcagagaaggaaatgtttgaactacatcgacaaagcttaaaacctcttcgtcagatcttaacgcttcctatatcttccaaagactaccaagtctatgaaaatctaatcgtgagtatagaaggcatcggagctatggttgaagaatggtctgaaggacgaagagcggatattaagaagcgagaaaatcagctggatgagcaattaaatgaactctaccacgctagaaagaaactattaatagaacaggagtcgaaaaagtaatatggtcaaaatggtattaagttcatcggatgcacaaggtcagaccatgtcttccgttggaaagactagagttgatgcttacaactcagcggttaaagccctctctaacttcaatggagcgagtgacttgcaagggagtgcctatgattcagggaaacaatacggagtgagtgtgattacgccactaattaaaggggcgatcatgtattctgagtacctcagtgaagctgtaccaaaactcccttcaaaatatcggtcagaagttggggacgaagatctggattcagccgtacttgaaagtgaaattcaaagcctcgaaagtagcattagtagtcttagaggtactttgcgagctatggaaggaagtgatcatgcggataagagtctcctgcaaaatatatcttctcgtatggatggtttaacgtctcaaaaaaatgagaagatggataaacttcgaaaactaaatctatttgcggggagttccaatgaagttttctcaggagaaggggaggttggcccgattaacactttaattcaaagtattcaaattggtttaagccaaattcaagcagagtttacaaattttagtggaacttttcatatgccaaaggaaacttcttggattactgatatttctactcaatgggaagagcgtgagaaaaaatctcaactagatgaggattccaagaaagcattagatagacttgaaaaggataaaaaagagggtaaaatttcaaatgatacctatcaatcattgcgaagtggaattataagtggtggagttgcatttcttaatgaattagcaaaaagtaaagttatagaaaagggcgttgaaggttttgtgaaatttgtttggaaaattttagcttataatccacaaaatacacaatatggattggtgggagcagttgcaggaggtgggacaactactattccaatcaatgttaatcctgcttatagtcaatttgttagtggtgttgccaaatacggagcaccaataattggtgcggctattgatttcacaatgcaggttaatgatggagcaaatatagttgatgcaggtataaagacaagtgcccatgttgcgattggtgttggagcagctaaattaggttcagcaattggaagtgcactggttccaggtgcaggtacagttgttggtggagcaattggttttgttgcaggagtagcagggtcgatgctcttcgacttcgtgtatgataacaaagataagattgcaaaatttgtaaaagattcttctgatgcagttgttaatactgtaaaaacaaaaatgaaagaagtgggcgatgcagtttctggtttcttcagtggcttaggttcagttttttcttagataaggataatattttacaatgttagaaaaaaaagagaatcataaacaattagtgaatttgagtaactataaaaataaaacggtctattatgatttgaggcttaataaactttatttttcattacctaaaggtagttctaaaaatcaacatttttatactctttttcttattttaatagcactgccaatcgttcgattatttaataatatggatatatttggtgtgtttgtaataaaatatttaggtttgatattatttacattaatttcaatatttttaggaaatttttttgtaaagtatcagtataggaatttagacctgtatccggcttcttttagtgatattgaatatttagaatatttgcattatgaaaagaagaacttaatgttcgtttttggatatttcattgcgattatctttagtttagtaatttcatttgtaatttatttaatcattggaaattttttaagtttaatcatatattcagtattattatttgttatatatgtatgttttgctaatcgtttatatatgagaaaaagggtagtagataccttgttaaaagaaataagtacctaaagtaaagatactataaatttttattgtttcttaagtaatataattaattttaaaaattttagaatagtattaaatttaaatgaaaggaatcagataaatgaatgaagtgttgccaattggaagtattgtccaattgaataatggagaggtgaagttaatgataataaatcgttatccactttacaataaccatggagtgataggctattttgattattctggttgtgtatatcctaatggtagtttagataatcaggcatatttttttaacaaagaaaacatagctaaggtctggtttaaaggttatattgacgagtccgaagagttacttcaacagaaattcaaaaaggaaaaagataatattaattatcctcgactaagtcttgatgaataatactgatagattattaaaaaaataataaaattgaaataagataaagaaatagttatatcgtatattgaaagagacaaatagtagaacaggaattgaattgataatatggtcaaaatggtattaagttcatcggatgcacaaggtcagaccatgtcttccgttggaaaggctagaatcgatgcttacaactcagcggttaaagccctctctaaattcaatggagcgggtaacttgcaagggagtgcctatgattcagggaaaaaatacggagtgagtgtgattacgccactgattaaaggggcaatcatgtattctgagtacctcagtgaagctgtacccaagcttccctcaaaatataggtcagaagttggggacgaagatctagattcagccgtgcttgaaagtgaaatccaaaaccttgaaagtagcattagtagtcttagaggtagtttacatgctatggaaggaagtgatcatgcggataagggtctcctgcaaaatatatcttctcgtatggatggtttaacatctcaaaaaaatgagaagatggataaacttcgtaagttgaatctatttgcgggaagttccaatgaagtttttgaaggcgatgctaaaaagagcatggacacagtcgtgaagaatttggcatctggattgaatatgatacagggtgatttcgcgagcttcggtgggacattccccaaacattctggaaaaacgttgaactgggctaatagtatcgaaggtgaatgggataaaaaagccaagatagatgaagattatcagaaggtgcttgagaaaataaaagacgggaaagagcttaatgacgatgatgtgaagaagatcgatgcttataagaagcgattttctaatagagatataccagagacagtccaattggctgttgataagcataaacaggcaattgaaggtaaaaagttaaaagcagcggctaaagaagtgtcagaaaaggaaggggttccttatgaggaggctttagagctcgtaggttctacagttgcagaagaacttacctcatcgcaacttgaaaaaattaaagtttattatccaaaactcgcagaatatattcaatactttgctaaaacagataaaatgggtaatgtacatatatctatgaattcaaacgtaaaaggttatactaataatgtagtaaaagagacaactaaaagtttccttaaacgtttggcttcagaggtagacattccagtaccaggaactaattcgtctgttggaatttcagcagtaagttcggcatttataggctatgattattataataatttgcaaaacgagaatgcgggacgtgcctttatgcatacggcagccacaactacatctacagcagtaggagttgatatgctgactacaggaatcttatatactagtacaggaggtagtatgttcacaccagctgcaatggaattagttggatttatgggaagtcatccagttggatgggctattatggcaggcattggaattggttatcttgcaacagtagcctatgataataattttttaggtattaaagatatagctaatgattttggtgataatcttaataaaggactagaatgggtgggggataatattcattcgggtctgaaaaaaacaggtgaatttattgattcgacattagatggcgttggcaaaacttttgactcaggtataaagtcaattcaacatgtttttggtttttgatgaggtaggaattaagtggaattaaaatttaaaaattcaagtatgacatgttttcagattgtccagttagatcaagaatcaaagaagtatatcatggatacaagtacaatgagtccaaagagttattactggggatttaaaacagatacgattacagtgggtatggtggagatcgaaaagaataacaatcagttcgaaattaagcctacaacacctgtaagtacaacaatggcagccattatcgtacaaccaattgtcaaaattggttacgatgttataaagcggctttttattaaaaacaatcttagtgagcaagtgttattaaagttattactctttgcaatttctatgcttatttcttactttgccattttgatttcattaaaggtggcccataaaaaagcagataaatggattcctaaaaacagccataaatacacagttacctttacaactattaagaaaagtaatggaggagtatatcctttggttggagcaattttcatttgtttacttttctttcttggtttgaataatggaacagaaggagcttttttggtaatcaatggaatcgtatccttattctttttcatgtttactctaggaagttatccaattgcttatccctataagcaaggtcaaattgtggttaaaaagattgaaaaattgtagaggaaaggaaataaaatgtcaatattaccaatcggaacaatcgtatatttaaaagaaggaagtcaaaaactcatgattcttaataggggtgtgactattgatcaaaatggggaaagtgttctttttgattattctgcagccttttacccaataggattaaatccagaacagttattctattttaatcgtgaagatgtggataaagttgtatatcctggttatagcgatgaagaagaggagcgatttgctgaaatctatcaacgttggcttgatgagaactcggagactattaaaaaaggtgtaacgaaatctaaataacacgatagaattttatcatcaatggtttatactgaaaatttataactattaattttagagagaaccacggttctctctttttcatccacaactttccccacctagtaactaacttgctcttcaaactaattttcggtatgaatagtagaaaatattcttaaatctaactcaatcataaaagaaggaaaataatccatgaaaaagatgctactattactggcgagtgtgcttgttttaacagcctgcactcagccgaaaaaagaggccaaggaggcaaccgcaagcaaaacggagcaaactacaaaggcttcctcgtctgctaaagaggaaaaggggttgaaatttgtagtcgcgcctcaattcgaaggaaagacatcagaattgatggaactggggaaaaagttagttaaagagcattcggaagttggcgatcaaggggatatcactgtgtattatacagggaacacctatactgtagagcaacaagaatatgcagtatttatgttggtcaataaaactacaacgaatattgaccatgatgcgacctttaaaattagctggagttatgatgggtaatctgtttaccaagatcaagtggtccagtatagtctatcgaataatcctaagttaccgacccaatcagcgactctcttgttgcttcctttgacgagtgaacaaaactcgatcgtagagaagatatcagatgaaacgaagatgagtctgagtatcacagacattatgatgaagtaggtgatggacatgcccgatatcagaatacttctagtcattgctgtggctgttattggatttcctttgtttaccgtactattttttggacatttttatagaagagaagttaggattaagaccctctcgtcaaagagcgttgagggagtggtagttggctataagaggacacaaattgtagcggctccaattgtagaatatagagtggatggtcagacctatcgaaatagcctgaaatattattgagtggtgcgggcaacatttccttggaaaacgaatcaagcggctagtgacatcgatttgatggcgcaaaggataaccgtctacaccaattctacagtctcaaagggaaatctttttcaagatgcttttccattgggatcgaagatgacggtctggtataatccagcttgtccaaaagaatcatacgttgaacgctatagtgggctagataaatcttataagcgggaaatgtggattggaatctggatgttgatattattgcctattttggcagttgtggccattatcatggggatgaagtataaatgatggatcagccctaactgaagaaatgaaacatggggagaaatcaccgctagaccggtgattttttcgtcttcacttctccctcgaattaatccttaaattgtgataaaataagggttacgaatgtttttgactggtctgtttttgcatagaaagtgggccactcaaaagcgagcaaaagaatcaagatcaagggagaaacaatgtccaacacctttgaaattttaatggatcagctggatatgccgctggagatgcgatcttccagtgcctttttgcatgcggagattcaagaagtcgtggtgcacaaggtcagtcgggtttgggagttccgctttgcctttgcggaagtcttgccgattgctttgtttaaggaattgcgccagcgcttgaaggatgaattttcaaagacaggaaaccaggccacctttaccatccaagtggccaatcaggatttttctgcggatttattgcaggcttactatcgtgaggtctttgaggaaggaccttgtgctagtcaaggctttaagggactttaccaagacttggaggtgcgtgcagaagggcaggaattgatcatctcagggccttcttcggttgatacggagcatttccgcaagaaccatttgcctaaccttgccaagcagttggaagcctttggttttccgcatttcacctgtcgggtggagtctgatgaggagttgacagagcaagaagtggcgcgctttgaggaggaaaatgaaaagatcttccaagcggccaatgaagagaccttgcgggctatggaatccttggcccagatggctccgccacctgcgattgaagaaaagccggcctttgatttcaaagctaagaaggctgcggctaaacctaagctagacaaggccgagatcactccgatgatcgagatcacaacggaagagaaccggattgtctttgagggtgtggtatttgacgtggagcacaaggtaacacggaccggtcgggtcttgatcagctttaagatgaccgactatacttctagtttttcccttcagaaatgggtcaaaaatgaggaagaagcccagaagtttgacatgatcaagaagaacagctggctacgggtgcggggaaatatcgaaatgaacaatttcacgcgcgacttgaccatgaatgtccaagacatccaggaagtcgtgcattatgcccgcaaggacctgatgccagaaggggagcgccgggtggaattccatgcccataccaatatgtcgaccatggatgccctgccagaagttgaagagctgatcgctaaggcagctgagtgggggcataaggctgtggctatcactgaccatggcaatgtgcagagcttcccacatggctttaaagcagccaagaaagctggaatccagctgatttatgggatggaagccaatatcgtagaggacaaggtgccgatcacctataacgaggtggatctggacctcaatgaagcgacttatgtggtctttgacgtggaaacgacgggactttcagccatctacaatgacttgatccaggtcgctgcttctaaaatgtacaagggcaatgtcattgaggagtttgatgagtttatcgatccaggccatcctctgtcagcctttacgacccaattgacagggatcactaatgagcatgttcggggtgctaagcccttggtgcaggttttgaaggaatttcaggccttctgtgagggaacggttctcgttgcccacaatgctacctttgacgtgggcttcatgaatgccaactacgagcgtcatggtcttcccaagatcacccagccggtcatcgataccctggaatttgcccgcaatctctatccagattttaaacggcatggattagggccattgaccaagcgctttggagtaggcttggagcaccaccacatggccaactacgatgcggaagcgacggggcgtctactctttatcttcatcaaagatgtcgctgaaaagcatggggtgaccaatctcaaggatctgaatatcgatttgatcgatgagaattcttataagaaggcgcgagtcaagcatgccaccctctatgtcaagaatcagaccggccttaagaatatgtttaaactggtctcactttctgggaccaagtatttcgaaggagtcccacggattcccaaaaccgtgttggacgcccaccgcgagggcttgatcctcggatcggcctgctcagaaggggaagtctttgatgcggtcatgtcgcaaggtgtggatgcggcagtcgaagtggccaagtactacgactttatcgaggtcatgccgccggctatttatgcgcccctcattgccaaggagcaggtcaaggacatggacgagctccagaccattatcaagagcttgatcgaagtgggagatctcctcggcaagcctgttcttgcgacaggaaatgtccactatctggagccggaagatgagatctatcgggagatcattgtccgtagtcttggtcaaggagccatgatcaaccggaccatcggacacggagaagatgcccagccagcgccactgccaaaagcgcattttagaaccaccaatgaaatgctggatgaattcgcctttttgggagaagacttggcgcgcaagattgttattgaaaacaccaatgcgctcgcagagacctttgagccggtcgaagtggtcaagggggacctctatacgccatttatcgacaaggccgaagaaacggttgcggaattgacctataagcgggcctttgagatctatggtaatccacttcctgatattgtcgatctgcgaattgaaaaggaattgacttccatcttggggaatggttttgccgtgatttatctggcttcacagatgctggtgcaccgttccaatgagcggggctacctggttggatcgcgtggatccgtcggatccagttttgtggcgaccatgatcgggatcaccgaggtcaatccactttcgcctcactatgtctgcagccggtgccagtacagtgaattcatcacagacggttcttatggatctggttttgatatgccgtacaaggattgtccaaactgcggccacaagctcagcaaaaatggacaggatattccctttgaaaccttccttggtttcgatggggacaaggtacccgatatcgatttgaacttctctggggaagaccagccgagtgcccacttggatgttcgcgatatctttggggaagaatatgctttccgagcaggaacagtaggtacggtcgcagctaagactgcctacggttttgtcaagggctatgagcgggattttggcaagtactaccgagatgccgaggtcgaacgcttagcccttggtgcagctggggtcaaacggacgaccggtcagcacccggggggaatcgttgttattccaaactatatggatgtctatgactttactccggtccagtatccggcagatgatgtgaccgctgaatggcagaccactcactttaacttccacgatatcgatgagaacgtcctcaagctcgatgtcctgggacatgatgatccgaccatgattcgcaagctccaagatttgtcaggtattgatccgaacgatatccctatggatgatccaggggtcatggccctcttttctgggacagaagtgctaggggtgacagccgagcagatcggaacgccgacaggaatgttggggattccagagtttgggaccaactttgttcggggcatggtcgaagagacccatccgacgaccttcgcagagttacttcagctctctggtctgtctcacggtaccgacgtgtggttgggaaatgcccaagacttgattaaggcaggcattgccgatctatcgaccgttatcgggtgtcgggacgacatcatggtgtacctcatgcacgcgggtctcaagcctaagatggcctttaccatcatggagcgcgtgcggaaaggcatgtggctcaagatctctgaagaagagcgcaatggctacatccaagccatgaaggaaaacaatgtccctgaatggtacatcgagtcctgtgggaagatcaagtacatgttccctaaagcccatgcggcagcctatgttatgatggcccttcgtgtggcctactttaaggtgcaccatccactttactactactgtgcttacttctcgattcgggccaaggcttttgacatcaagaccatgggggccggccttgaagccgtgaaagcgcggatgaaggaaatcgctgagaaacgcaagaacaatgaagcttccaacgtcgagatcgatctctacaccacccttgagattgtcaatgaaatgtgggagcggggcttcaagtttggcaagctagacctctatcgcagtcaggcgacagaattcttgattgatggggatacattgattccgccatttgtcgctatggatggtctgggagagaacgttgccaagcaaatcgtgcgggcgcgtgaagaaggagaattcctctctaagaccgagctccggaagcgcggcggtgtttcgtctaccctggttgaaaagatggatgagatgggcattcttggcaatatgccagaggataaccagctcagtctctttgatgatttgttttgatggataaatgatttttattcaaaagaattagccactcttaactacagattcatatgaatttgtagttttttaaaaatacaataaaggcggatgaaatgggtattcaatttacttcaaaaaaggttggagagctattgaaagaaggaaatttgcggattccttcttatcaaagaccttataagtggaacagaaagcatattcgtaatcttttttatgatttacgagatgctatggaaaaaaaggaatatcaagttggctctgttatctttcatgataatggtggatacttagatattgtagatgggcaacaacgactaatttctatttccttgtttcttcattcattagaaaagttaaaggattatgaaggcgctaatcaacttttaggtgctgaatttggagagatatcctgctatcatgcaagcgaaaattataacgagtgggaaaatttaactcaattggttggtacaagccaggcaaaagatatttgcgaatttttattggaaaattgttctatttcttgtatcatcatgccagaggaacgtttggcagaagcctttcaattatttgattctcagaataatcgtggaaaatctttagaacctcatgatttactcaaagcctatcatctgcgtcaacaagactcagaagatgaaaaaattgttgagaaatgggagcagtttgtggaagatgacgatttaagtctgaaagatctatttgataagcatcttttccgtatgagacgttggtctaggggagaaacaggactaactaacaagcgttatggttcttatctgcgttttacagaagattttattgacgattttaaaggtgttgatttaaatcagaattttccatacctagaattatatcgtcatattgaaaacttccctatgtcaattactatgccaatcatagatggaagcaaattttttgaatatattgaatctgttcatcaaatgattaaagatcatatagatgttttaaataaacagttaggaatttttaatgatcctaagagtgaagaaaatggttcagattaccctgaaggtatgttaaaaatttacaatagttcaaaggggcgctatcgcaagtgccacaatctgtttctaaacatttgttctctctttgcggagagatttggaaaagataagctatcacaggaaatagtagaaaccttgtttatttgggcttactacccccgtgtgaagtctcgagccatatatgacgctactgtaggaaactacgctgcaggcgggaagttcagacaaagagaagttcaaaaactatttcaagttttagcccatgctgtgactccgaatgatttcatggttaagatagatagagaattatttgaaaattatacgatggaacaaattatagaagaggaaaaagataaatggtagaaacacatataagcttatccgttaaccgtttgttaaatgaagatacctatgctattcctctttatcagagaaattttgcttggacttatgatgaaattgaacaattattgaacgatgtggcagatgcttttcaagaaaagagagacaattattatattggaacattagttgttaatgaagagaatgatcttttcaaaataatagatgggcaacaacggacaacagcacttaatttgattgccttagctttgaagcatgagtttggttttgatagattgaaagctgtcaatcttaccttcccagctcggagaaaatcaaatgagaatattcaaaaactatttatcaatgaaaaaatttctgaggacgatgaaaatgaattaactagaggttacagacatgctaaagatgccttgaaaaaagtgctaggagagcgccaacttgaacctcagcccttcgttgattatctttttaataaagtcatcatttttcgtagtattcttcctaaagatttagatttgaatctttatttcgaacgtttcaattctcgaggagaacaactagaggctcatgagattcttaaggcgcaaatgatggctaagttcggtatagatcaagaaatggctcaaaagtttgcaagaatctgggatgcttgcgcagagtttgataagccagtagcaagtcaatttaagatgaggcggaagagggcagataattttcaggagcgtgaacgtattttcggatggcacttttcaaattactcctttcataatatttatgatgacattgatttttatcaaaatgaaagaagaaagttatcagatatattaggaataaaggtcaatgaaaaaattacagaatcagaaaaagattttggtgactatacccaagttattgattttccgacgtttttactccatgtattggcaatttgggaaggtaaggataccagtgaggttcagttagatgataagaaactcttaactctatttgatataaaaaataaaaatgagacttgggttattgagttcagtgaattccttcttagaatgaaacatatttttgataatttcattgttagaaattcaaatatggattcttcaagcagaaataaggatgaatggtttttgcagaagggtacttactatgaataccagccaaatggaaaagcaaaagagcattacatagttgaagaacgctttactaagaatacattttcagattcagaaatgaacaaaaacatcattcttcttcaatctatgtttgctgtgactttcactgccaatcgtgatagtcgttggttatatgaaagtttgcgattcctcttcaaccatattgaagagttagatcaaccggaatttggttcttattttaaggattttcttgaaataatggctgtaagatatgctgagggaagattgttcaccgaggaagatatgctcaaaaaatatggtgatattcctgtttatgcattcaattttgttgattacatcttatggaaaaaccgtgaagaattaggaaggaagtataaaggtgttaaatttgatcatttcaaatttgcttatcgtcgttccatagagcattggttcccacaacatccaaatagtgatgaaaaaattgagaaaatggatgatcaattcttacactcttttgggaacctttgtatcattacagatagtcaaaattcaaaatttggaaatttagtcccgagtgcaaaatataaacagtgggaaggaatttttgatcgtcagagtctaaagttacaaataatggctaatataacagaaaaaactaaatgggaatcgtatcaaataaaaggacttgaaaaagaaattttacctatggtcaaaagattcatagaaagtaagtcataagaattgccttgatcattaatttcaaaaggctattgtatatctaatagatttacaatagccttcttttttgttacaataatcaatagaaagaaggtgagaatatgtcaaagacgagcatgagtatccgtttggatagtgaggttaaggagcaggcccaactagtgtttaatcatttagggatggatatgaccacagctatcaacattttcctccgtcaggctattcaatatcagggcttaccttttgatgttcgattagacgatcatgggaagttgctccaagtcgtaacggatgtagagcaaaatcggaatatgagtcaaccctttgaatcagtctcagacttgatggaggacctgcgtgcttaagattcgttatcataaacagtttaaaaaagattttaagttggcaatgaagcgtggtttgaaggcagacttgttagaagaagttttgaattttctggttcaagaaaaagaacttcctgtcagatatcgtgaccatcaattgactgattccaagcatttccaaggtgttcgggagtgtcatatccagccggattggcttttggtttacaaagtagataaggacgaattgattttaaacttgctgaggacaggaagtcacagtgatttattttgatggattcaacgatcctcgctcagtttgaggttggctaatgatagaaaagaaaaaaagagcaataccctggaagtcggggaaagtcatttccattcgcctacggaatggcgtctatgtcttagcacaaatggtgagagagccctatctggtattttttaaccatttcaaggaggaaaatagctggaagggagtgaccttgaaagaggagaatattctcttttgtaaagcagtcactcgtcagtttctacgctctagtcctgtaacgattgtcaaagatcttgaccctctcatagattatcggttacccaaagaatggatttatagccatatgggagggcatccgattacggtttcggtgaagggacgggagcgccaagtaactggttttggccaacggctttccttggttcaggcggacaaggaaagtggccaagcagaggataatcctctaatgggactcttccaagcctatatcctaccagatatccaagagcaagattgggagcgggtcggtcaggctgagctcatgtctctcgaagtttttccaacgctcaatgaacgtctttatctctgctctctctatgggaaaaatgtgaatccagagctagatatctctttgggaaagcccttgcccgatgcttatgaaacctatctcgatattcttagcaacagcccagaagcacgacgtctctatctgggtgaggaggatgactaagaaaggaatagaacatgaaggttgacatttttgcggaagacaaaccagctgaaaaagtctttgtctacaagctagaagtggcagaccatgtgttgctcctttccaccgccatgctctcgggagcaattgctctagccagcttatgttcagccttgaaagattagatgatagcctctattttctttttgaaaatagaggtttttaagtccgttcagaccggataagtgttttctttggatctggattgtgttacaatttttagtgacaagtgtttgtaaacaggaaacagaaaaacaatggatgttcttccaaaaaaatgaaacagaggagaagcgcgtggcaagatatttagtaggtccttacaacaatagttggaactttatggatgcacttgaaaaagcgcaggatggggataccatcgagtttgaaaatgggtatgtctttcaatggccgacaaataaagtgatcgagatcgacaagaaccttcattttgtggggcatgtggtcccaaatccaaatggcaatgggcgcatgtttaacaacacgattgaggcttccttccgatttgtagagggagctcaggtgacatttgaagatctgtggtttaaagttggtgggaattacactaccttgctcttatggaatagctcagatatcatctgtaaacaggtctattttgaagcaaccactccaacaaataatgaattttttatctatatggatacgcattcgaagttgacactggaaggagtcgggatgaaggttccggaaaaacaccaaagtgccatcggtatgtccgcttcggaattgtctattcgcaattcaacgattttttctaagattgatctgtcagaaggatctaaattgaccttagaaaatgtccatattgaaatatttgggaataatacgatccatgccaaggactcagaagtgatcgcaaaaaattcaacgattacaggcggggatctggaaaaggactttccaccagtttggttgaggaatgtcatctgggagtctgaaaactgtaaaattgagttgcctactggtactggggtctgtcttgataataatgttcaattcaattcggattcggatcatatgacctccatcaattcatacaatagtatgatccgagctcatcaagctacattttcagaatttttatgcgtctatgaagaatcctttgcttccctgactggagaaacaaccttcttgaatgagaatgctcaaaccatttcatttggagtttttgatgatggtgtgctgatggctgagcatatgatttgtcataagattgcggatcccaatatacggcttcaaggtggagcttttgcgaaggtgggcaccgtgacctataggcagggcgatgcgcgtgatctgaccaaggaaatcgaggatgactgtgactatcttgttggcagagaagtggcgaagggcaatgcgcaagtcgttcctacgggacagacgacggatgcaacggtggctccaaccaccgcaagagactctgaaccagagaagaaacaagatgctcttcaagaactcaatagcctgattggtcttgaaaaagtcaaacatgagatcaagaaaatgatcaacatggtggaatttaacaagaaacgaatcgccagtggcaaggctcctgaaaagcaaaccttgcatgctgcctttatgggaaatcctggtacagggaaaaccactgtggcccgtctgttgggacaagtgctctttgatgcaggtgtcctctcaggagaagaattccgtttcgtggaagcaacggagtccgatctgatctcttcaaatattggaggaacagctgaacagacccaagccctgcttgaaaaagcgcgaggaggcatcctctttattgatgaagcctatagcttggataaaaaggacagcggtgcggactttgggatcgaggcgatcaataccatcctcaaatttatggaggacaatcgtgacgacatcatgattatctttgccggctataccaaggaaatggaggagttcttaaaaaccaatccaggccttcgttctcgggtgccaaataatttcatctttgaagatttcacaggagatgagattgtccaactaggtgaaatgatcctaagcaaaggggactacaaactcgaagaccgagattactatgcgcggcacgttaagcgggcttatgatggctcgctagataagagcaatggtcgctggatccggaacctggatgagcaattgaccaagaccatggcagatcgggtggtggcccaaggttccgacgatattgagaccatcctcaatagcgatatcgatgctgtccttaaccaaggtaagtatcaagcaggagccgacaaggaagaagatgggatggctgccctcaaccgtttggttggaattgctaaggtgaaagagcaagtcgaacaattcgtagccatggctgagttcaatcaaaaacgggctgaacaaggtggcatcgtcgaagatacgaccttgcactctctctttcttggaaatcctggtacagggaagaccaccgtggcccgtattttgggcaatatcctcttccaaaaaggggttatcaagcagaagaaattcattgaagtttcgcggagcaatctggttggaggctaccaaggtcaaacagccttgaagacgcgtgaagttttggaaagtgcactgggtggagtcctctttatcgatgaggcctatacgctctataccggtttaaatgacgattttgggaaggaagccttggacgaagtcctcaaatttatggaggatcaccgccgcgatatcgtcattatctttgctggttacacaaaagagatgcacgacttcttgcaggtcaattcaggtctacaaagccggatcccgactacatttgattttgaagactacagcccagatgagatcgttgagatcggtctgttaggattgcgtaagcaaggctaccaagtcaatgaagccctttacggagagattgtgaaagggaattatatgcgtgctaatgaccatagtaatggtcgctgggttcgcaatcttaatgaaaaactcttgcgtcaagtatcaactcgggtaacccgtgaaggtagtacagactacaattccattttggatcaagatttggaagctttgagagagaatagcagttctgaacaaccccataccgtggatgatcaaggttatgttcttccttaagctagaagggacaagaaaaaggatatcccttcagttgaagacaaagtcttcttagaaactttccttaggtgagtacggacgtcagcgaacttctacgaagttccatgactaattattgagcctaaggtctcaataattccgagtgcctgaaactattaagtttcaggcacttttctcacagcggaaagtttcggtatttcttgatttgttctaaaaagaactcatttttatttcttttcagaatcacttaacctatcttatattaaaaaaggttgtttatgttctaaaagaattctatatggacttatggtatactaggaggagattattcacttatgaaggagaaaacaatggttttaccaaattttaaagaaaacctcgaaaaatacgctaaattgttagtggcgaacggaatcaacgtgcaacctggccataccttggtcttgaacattgatgtggaacaaagagaattggcccacttgattgtgaaggaagcctatgctttgggtgcgcacgaagtgattgtccaatgggccgatgacttcactacccgggaaaaattcctccatgcaccgatggatcgtttggacaatgtgccagactataagatcgcggagatgaactacctcttagaccacaaggctagtcgcttgggtgtgcgctcgtctgatccaggtgccttaaatggtgttgatgcagagaagctttctgcctcagctaaggctttgggcatggccatgaaaccaatgcgcatcgctactcaatccaacaaggtcagctggaccgttgctgctgcagcaggactggaatgggcgaaaaaggtcttcccaaatgcggcgagcgatgaagaagcagtggatctcctgtgggatcaaatcttcaagacctgccgggtctatgaggaagatccagtcaaggcttgggaagagcatgcagctattctcaagagcaaggcagatacactaaataaggaacaattctcagcccttcactacacagcgcctggcaccgatttgactcttggcttgccgaaaaatcacgtctgggaatctgccggagccatcaatgcccaaggtgaaagcttcttgccaaacatgccgacagaagaggtcttcacagctcctgacttccgtcgcgcagaaggttatgtcacctctacaaaaccgcttagctacaacggaaacatcatcgaagggatcaaagtgacttttgaaaatggagaaattgtggatatcacagctgaaaaaggcgatcaagtcatgaaagatttggtcttcaaaaacaagggagcgcgtgccttgggtgaatgtgccctcgtaccagatccaagcccaatttcccaatcaggcattaccttctttaacactctctttgatgaaaatgcctctaaccacttggccatcggggcagcctatgcaaccagcgtagaaggtggtgcagagttcacggaagaagaactcgaagcagccggccttaaccgctcagacgttcacgtcgacttcatgatcggctcaaatcaaatgaatatcgacggcatccgagaagacggcacccgcgtcccagtcttccgcaatggagattgggcaatttaaggagaaactatgattggaagtatgtttgtcggtcttttgatcggacttctagctggagctatcaccaatcgtggcgaacgcatgggatgttttgggaaaatgtttctgggctggattggtgcctttttaggacaattactctttggtgcttggggaccaagcctaaacggtacagccattatcccatcgattcttggtgccatgattttattagccatcttctgggaaagaggaagctaggtttaacttgctaaaacagatagagtggttggaaatcttccaacctcttttttagtcaaaacttgatcatcaaagtaaaatcaggtatcatggaaggtatgttttgttatgaataaataagataattatggctgtggtagactggtgaaaagttagttcagattctccgtctaggaatgaaacagtatagaaagtaagagacgtgtatgtttaaaccagcaaaaatcgaacggttgccgaaaatgaactttcgctatcatttgttaaaagtcgatggagagtggtatttgatggaggtcgatcgtccgattattatcacctattttctgccatggtttgttttttttattcctcataaagcctatcagctaacagaggatgaagtaggagccatagctccaaaagtatttgaaagagacaagaagcatcagagtttagtgaataacaaaattgggaagacctcgcttggtctaggtgtaacctccatgctattagcaagggcgtttccaatagaaaaatacctaaattttacctctcacttgcttaatctatccttgatgatgttgattttaatttttgtagtgggactttggatttggatgggtagaggggaagggatgcatgaaattgtggcagataaaacacctcgaaaagtgtattgtttcccagcagacacaaagaacataatattaccactaacatatgcaactattcctatggtaatgttcattgcagcatgttatgcaattttaataaactttgagcccaattttataatacattttggtctattaatctcatcatttctgtttttatcatctgggaatttaattttttattccccaatctactcttttaaagctaaagtcaagtagatccagtcgagtgatactcagaagtaggagtaacatcaatctgcttttttgccttaaaagaatgttttagacaagaaaaatacctaaccgagagctttctcagttaggtatttttgtcatttacgctattctaaaatcaagagtccttctttgatttcaaatgggttgtttggattgatgcggtcatagaacatgatgccgttggtgtggtcgatttcatgttgaacgacgatggagttgtagcctttgagtttgatgcgtttcttttccccatcttttgtgaaatactcaacagtcacgcgggcatgtcgaaccacatagcctgggacgttgcggtctactgagagacagccttccccgtcgccaagagctgcatcttgaacagaatgggcgacaacctttggattgtacatgacttcttgaaggctataggcttcttttggtgggttgccatcggcatcttctggattgggaaccaaaacagcgatgatccgttttgagatatccagctgaggggccgcgagtcccactcctccacggaggccgagtttttcagccatgacagggtcttgagaatggtgcaagaattgcatcattttttcacctaggataatttcctggtcagacaaagggaaggtcacatcctccgcaaccgctcgaagtgtgggatttccttcgcggataatgtcatccatatcaatcaaatgggatgctcttgtaactttttcaattgctttcatcgttttactctcactttctttctaccctccatgataacacaaaagagcctaaaattaaagttatctgtcgacggtttccgcatgtttgatggacaaatcattcatcctttttgcatctaaaatcgtatagactctcccttctctttggactaagccctcttcgatcatctgcttgatgacgcggctaaggtggcggtagctgatcccaaaatgcagggccagctgattcatcttgggcttgagggtcccattttcatcgcaatgttccataaaatgagtagcgaggcgttccttgaccgaataatgaaagttggcaggagccaaatagttgatctggtgcaatttctcagccaaggtcttggccgtagagcgcaaaaaggttggatcaagcaggaggcgcttcttaaagtgctgggctgggagctggacgactagcgagtcttggtctgcaatgaccgatgtgatacagacccgatcgagcaggagctcaatctctcctaagagtccaggtttttcttggatttcaaggattgtgtcgctaccattttcaagactgtggacgatcttgagccggcctttgagaaaataaggaatgacatcttggtcagaaccctggcggcagatatactctccagcctgatagagaacgagatccagctgactaagacagtcacctggaaagatctgatccaattggtagtcagtgatgatctccatgagtttcgtagatggggaaatttttttcatcttaatctcctaaaataggacaaatgtcctatttttctctttctaaattgattatactaggattctattgaaaatactagtttgaatcttttctaaaaaaaactagtaaagtcaaatgttaccagtaaagtgtaggaaataaaaaaatgaaaaaaacaatggaaagaatcagtctcttgagcttgtcgctcatgctgatctcatctttttcaattacagccggtttgccagctatgaaggcctatttcagccaattcggatattcagcaggacaggtggaactcttggtttccctgccggcctttgcggttgtggtcatgctctttttaaatagcctgatcgagcggtggatgagtgagcgccagatgattgtcgcagggctcttgctcttttcaactagcggccttgtgcctttggtcgtgcaggactatcctctcatctttctgagtcgttttctctttggtttggggacaggaatgatcaatgccaaggctatttcgattatcagtgaacgctactcaggcaatgacaagactcggatgctgggctatcgggggtctgctgaagtggtgggttctgccatcttgacttttatggtgggacaactcttacccctaggctggccagcgatctttgctgtatatggaggtggttacttgattttactcctctatatcctttttgtcccctatcctaaggggaaaaaacagtctagcttgaaggagaaaaagaaaggttccgcacgccttcgctcccctcaatggcgttttagtctgatgctagccgtgattgctggtatcatcatttgtttcaattctattattagtctgcgcgtgccggatatcattgttgacgctcatatgggaacagcgacaacagctggaaccgtcttgagtctgatgcaattaacagggattgtcgcaggggtaggatttgctagtttgacacatgttttcaaaaagaacttgctcatgatcatgtgctttggtttcggtctagcgttagccttgattggcttgtctggacagctgtggagcctggttctaggaaccctcttggcaggatttacctacagtacaggagtaaccagtatcttctatcacttatctgaaaaaattccgactaatcttctgaatcttgcgacctcgcttgtcttgattggctgcaatcttggatcagccgtctcctctttcttcatccagttggtgacgccactagctccttccaatcatctgctctttgtcttgattggtgctttgatgctcctaacaggagtcttcgcctcacaattactagtacgaacgaaatgattgaaaaatcatttcgtttttttaattcaatctattgcgtcctgtcactagctcgtgttattataggaggagtgtgaaaaaaagaatagtttaaaggaaaaaataatgaaaagaatcatggagaaagtgagtattctcgcgctttcatttattttgacgacctcgttttcgatttcgagtgcgcagtcggccatgtttgcctattacaagggaattcctcacagcatgattgagctcttggtctcgcttccttctgcagggatcatggtttcactcatcttcaataaatggattgggcgcctattttcagagcgtcagatgattgtgataggcctagtcgcttacgctctatgtggctttattcccttaatcagtccagcttatccggttgtctttttgtctcggattattttcgggatggcggttggcttgctcaatgtttctgccattgccattatcagtgagcgctataaaggaaaagaacgtgtccaaacacttggcattcggggttctgcagaggttgttgggacagctgttttgacctttggagtgagtctcttgattcgctttggctggcaggctgcctttctcgtctacggtatcagtattccaatcttacttttgtatctcttatttgtgccatatagttcgaaaacagttggtgtagaggagaaacatcggaatgatcagatgacagctggtcaatggcggacggcactaggcttagctgttgttgcggcgtcgatcgtcttatctaatgtcatgattactgttcggattccaagtgtggtggagcaagttgggcatggcactgcccaaactgcagggattatgttagcagctatgcaatttgtcgggatccttgcaggattagccttctcacccttgacccagctcttccgcgatcgcttgttgctcgtttcgggagtggcctatggcttgacccaactgttgatcgggctttctaccaatctctggatgcttgccattgtgaccatccttgcaggctttgcctatagtgtagctcttacaacagtttacaatgtcttatctgataagatgcccgcaggggtcttgagccaggcaacgtccatggcggttttgggatgtagtacaggttcgatcgcaacgacctttgtccttagtctattagggactatctcatctgctccagccttcatttttggattttctggtatcctcatgatcctgatttccttttttggcctttggattgtgcgaaagagcgggaagacatcatgcggctagataaatttttagtagattgtggtgtggggagtaggaccgaggtcaagcaactcctcaagcaaaagaaaattgcagtgaatggaaaaaaagagacagcagggaaacttcagattgatccagccaaggatcaggtgacctttatgggggaaaatctggtccatgaaacctttgtgtattatctgcttcataaaccagctggagtcatctcagcgactgaggatgaccatcaccaaactgtcttggatctattggatgagacagcccgtcaaaaggaagtctttcctgtcgggcgcctagatatcgatacccatggcttgctccttttgaccaataatggtaagctcgcccatgccatgctttcaccgaagaaacatgtgtcgaaggtctaccgtgcccaggtggctgggatcatggatgaggcagatgtggcccgttttgaagcaggcattgccctcaaagacttcacgactttgcctgcgaggttgcagatcttagaggtggatgagacaagcgccagctcctacgtcgaaatcgaaatcgctgaaggaaaattccatcaggtcaagcgcatggtcgctgcctgtggcaaggaagtggtggatttagagcggatttctatgggtcctctaacgctagacccaagcctgaaattgggagaatggcggagactccagccttctgaactcaagtccctagaggtcttcggagttcccttataagcaaaaaaccaagaggctgggacaaaagtcctagcctttcaattatttttagattgtcgagcaagacgcagtggttgagtggcctctactacgctgatttcatcagcttttatagccctactcaactgtgcggaggtgggacgacgaaatcgaattctaacgaatgaccgatttctgtcccactctctatttttctttgtatcaaaaaaatgtacttaaaatacaaaaaagcatatataatagcttgtcttctcaaagtaaatcgattataatgaaaaaagatgggttgtgcataaaatcacaatatgtagtgataatttttcgactcacataccttatctagtaaacgtagaaaaaggagaaaaatcgtttatgaaaaagaggctttattctgttgtgatagcagttgtcctatttttggtagcggctttaggatttgccaaacccaatagtccggctaaagtccatgcagatacgatcaatgatgttgtgacatctgtaaacatctcgaaatcaactggtggggccattacagatccactcggtgtttgggaaagttttcaagttgaagcaaactttgtgttgccaaatggacgtgtaaaaaagggagatcagaccgttatccaacttggagatgactttaaggtctttgaaacggataccattgacctgctggatccaagtggtcaaaaggtcgcgacagcaacggtagatgatcaaagaaaagtcatcactgtaacctacacggattatcctgaaagaatggccaatgtgacagggaaactgcgtttctttgcgcgtgtagaccaccaagtcgtcaaagggcaaaagacacttgattttactctcacgatcgataagaaagtgatttcaggtgggaatatcgattacaaaggggtcaatccgggtgaaaatcctcctactccagaagtctttagcaaatggggctggaccaactcagataataaattaaaattgacctataccttgaacattaatcaaggtcacacagctcttcataatattgatattaaagaccaattggcctttacagatggaaaaatcaaagcagattctgtcaatatccatactggaacttggcagatcgataacgaagatggtgcctatcatttacgagataccaccaatgtcaccaagaattattcccctgttgtcagtgccgatggtcgttctctaacggttcacatcggagatctagctccagaacaaggaatgacaattcgctatgatgtttatttggacaaggtcccagccatcaatacttcctacaaaaacaatgcgaagatgacagctacagaaatcaaggagcaaaataaggttgcagacattctgtatcagttccttgatggaaaatttaatggtgagaaatactccttcactattcataaaaaaggtgaaaatggtcaagcgcttgcaggtgctgtctttgctgtgacagcagatgatactggtgagcaagtgggaactattacgacagatgagaatggtgttggtaccattacgggcttgatcaaacaagcttatacggttcaagaaattcaagctccaacaggctatgttctctctaaagaacctatcaagatcagcaaggacgattttggaaatgacctcgcgatttctcgtgatgttgtgaaccaaaaagaaaagacaagcgttgctagtcaaaagacatggaatgacaatgacgatcaagatggcaagcgtccgtcaaaaatcacagtcaacctcctagcaaatggtgtcaaagtcgcttctaaagaagtgaaaccagatgctacaggaacttgggcttatcattttgataatctcgatgtggtcgatgatgctggcaatgtcattgcctacactgtttcagaagaacctgttgaaggctatgaagcaactattgagggaaccaatattaccaacactcggacaccagaagttgttgagattccagtaacgaaagtttggaaagacaatgacaaccaagatggtgttcgtcctgacaaggtcactgttcgtctccttgcagatggtacagaagtagctagccaagagctaagtgcagcgactgattggaagacagtctttaccaatcttccaaaatacaatcacggcaaacaaattgtctacacagtcacagaagacacagtagccaattactctgctgcgattgatggaacaaccattaccaatagctacaagcctggtaaaaccagcgtcactgttacaaaacgttgggaagacaacaatgaccaagatgggaaacgtccaaacaccattaaggtacagctttatgcagacggcaaagctcaaggaaaagaagtggaactttctgctaaaaataactggactcatacctttagcaatttgcctctaaaagcgaaaggcaaagagattcagtaccaagtgaaagaagttggaacagtcaaaggctatactagtacggttgatgacagtaacaagggaaatgtagtgatcaccaatagccgcacaccagaagtaacggaagtagcggtcaagaagatctgggatgatgcagacaataaagagggtcttcgtcctgaaaaaatcacagttcgcctccttgcggatggtcaagaagtggctgtaaaagaaattacagctactgataattggcaggcaagcttcacggatctacctgtatacaaggaaggtaagaagattgcctacacgattacagaggatccagtagcaggttatacaagcaacattgatggtttcacggtaaccaatcgtcatacgccaccaacaacacctcctaccaccccaccaagcacaccgccaacgactccgcctaccacaccaccaacgacaccgccaacaactccaccgacgacaccaccaacgacaccgccaacaactcctcctacaacgccaccaagcacaccggaaaaaccagaaactccaactacaccaaaagaaggaaagaaaaaaattcttccatcaactggtgaagttgttgcttacggattgaccatactcggtgccctcttagcaatttttgctttggctttgctcttgcgtggtaaacggaaagagaaataagcttcataccgataaaagaggctgggacaaaagtcctagcctctcaattatttttggattgtcgagcaagacgcagtggttgagtgggctctactacgctgatttcatcagcttttacagccctactcaactgtgcggaggtgggacgacgaaatcaaattctaacgaattaccgatttctgtcccactctcttttgaataagttgcttgaagaatgatccatcaaactgtccatattcccaaggttctttttagaaatgagaaaagctcctctcaaaggaaacataagtgtttgacagaaagatgaaatcttggtagaataagaaggtcgaatagacaactaactctttcttggtagcaggatatgccaaacctgccactcggatagagcataaagaaaaggagcttatcatggcaatctcaaaagagaaaaaaaatgaaatcattgcacaatacgcacgtcacgaaggtgacactggttcagtagaagtacaagttgctgtccttacttgggaaatcaaccacttgaacgaacacatcaaacaacacaaaaaagaccacgctacttaccgtggtttgatgaagaaaatcggtcgccgtcgtaacttgttggcttaccttcgtacaaacgacgttaaccgttaccgtgagttgatcaactctcttggacttcgtcgttaatctgctctattttccacttacgctgcgttgtcaccttgcctcgatatactcgagtataatcttcggcttcggttcctagcatcgtaaggtaaaatagaccagatctatctcccttcggggagattttttgttttcagaagaaatccggtacaatcttcggttcgtcgccttgtctagaaacgttctatccagcaagaatggagctctctggattcagggggctgttttcttgtcttttccttatcgaacaagatccatcattctgaggaagtcgttttgtttgacagatgtaatatctagagttacaattgatgcatcataagaaatagaggttatcgatatgattgaaattacatatctagacggtgcaaaacaagaaagagtcatgcattttgattcctacgaagagtttgaacgctcccaacaagcctgcttgattggggtagcagatttttatcctgttgtgaaactgacctataatgggtatgaattggattaccaagggacttacggagatgtcttcttctatttgatgaagcaagatttgacgcagtaccaaaactaaaggagaaagaaaatggcaaaagcaattacagacgcaacatttgaagcagaaaccaaagaaggcttggtcttggtagacttttgggcaacctggtgtggtccatgtcgcatgcaagctcctattttagaaaaattatcggaagaactttcggaagatgagttaaaaatcctaaaaatggacgtggatgaaaatccagaaacagcgcgtgctttcggcattatgtccatcccaaccttgctctttaaaaaagatgggcaggttgttaaacaagtagcaggagtgcataccgcagcacaaattaaggccattgtggctgagttgagttaaaaagcaaaaaagctaaagaagaatgaaccttctttagctttttttgaattttattctcccaattctgcactgtaggcaatgatttgatccacagtgtccgaaaggaattggatggtatcgcggagtggtttgtcagttgagatatctgctccgatgatcatggctgactcaagtggtgtcttgctaccacctgatttaaggaggtctagccaatctttagctccgttttcggagttcttcaaatgcaggtaacccgctgttgagataaccaagccagctgagtaggtgtagctgtaaagccccatgtagtagtggctttggcgcatccaggtcaaagctgcgtcgtcatcgatttcaacggcgtctccccagaattctgtcaagacttccttcatgatgctattgagtttgctagcgccgaaggttccaccttcttcaatcagggtgtagaccttgcgttggaaggctgcttccaacaagtgggtgatgaagttgtggaagtaggtatctgtcaaacggtgagccaaagcaaagcgtttttgacgaggatcgtcaaactggtgttccaaatagtcgctgaggaggagctcgttaaaggtagaaggagcttccacatagtaggtcgacatgtgggcgttgaagtagctttggttgttgtctgagaagataaattgaccagagtgtccgatctcgtggatcagggtgtaaacatcactcatccgtcctgtccagctcataaggacataaggatggacgcggtatggatctgccgcataaccaccggaatccttgccttcattggctgcgaaatcgacccagcgttcggtttggtagcgggcaatttcgtgtgaatattcttctccaagtggtgcgacagatttcatgaccaagtcataagcgtcatcaatggtaacgtcagggttgagcgcactgtccaaatccaacttccaatcagcaaaggtcattttttcaaggccgttgaccttggccacgtgtttgaggaatttttgagcgaccggagcaaagtccttcatgatcaggtcaatctgacgatcaaacatggcacgatccacttcctgctcagctaggagatagtcaaagacagagtcgtagccccgcatatctgcaatcagcttttcagacttaacttgggctagataggtagcagcagccgtgttttggtgcttgcggagaccttctgagaaagaacgaaaggctttttcacggacttctgcattctcatggttttggtagaagttttcataggtaacaaagctattcttgtaaacttttccatccacttcgaaatcagccatttcaaagtcgcccgcccgcatcttggtatagatgtcttgcggtccgtagaagacttcaccaaggttggtcaaggtcttttccacatcagctcccaagtagtgagctttcttgattttggcttggcgaatggcaaaagtgaggtgaggaagttgtcccaggcgttcgaggacatcttcatctgcttcgaccaaagcatcatcaaagaaggaaagttcgacgctggcccaagtttcgaaatccattcccgcttgagcaatttccgcaaaagcttcgtcgccaaagtcagtggtttgtggcataaagctgtagttgccaatgtggctgagttggatctgaatttgttcaaagaccgcaaaggcagcttcaaagtcttcaaaagtgtggagcttgcccttgtagttacggacaaattcattgatttcctcgcgagtcttttcaatggcgcgcaagaagtcttcctggtcttggtagagggctgtgaggtcccagagttcgttttcaggaaattcagaacgtttttttaattccatagtgttctccttttgatcaaataactatactaagtatagcagaaaaaaagacagaaacatagggggagaggggaaaatgcttgtgtaaaaatcttgaaaagagctgggaaaacattttagattaaaatttcaattctaactactatatttaggtaagacatggattgaaattttgctgatatactaagtacatcagagtattgcatttcatgcaatactcaacactaatagctataaagaatataaggattgtttgataattttttgtggcaattcttatattcaaaattttagtaaaatgttgctaattagtgataggggaggttatatatggaaacaagagaagaaattgtctctaaattagaactcattcgtgagaatatattgggatttattcaagcccgttcacgtcaggttacacttgttaatcaaatgagaacagccaaattgattcaacaagatgaatataacgacaacacattgtctcataaatccctcaagcttgctttttcaattatggtattttcaagtatttcgatactattaggggatttattgtatgtcatcttacttggtgctgtgaatcgattaatcggagatattatctttgaagtattattcttatcaggatttttatttctattgtatcgtcgtatgaaaggttcaaaggatagctggatttatccagcgacactgattatgggagggatcttactggtattccctctacgtttgcttttgactcctaatcctataacattaattctacttggagtatcaattgtagccacctatttcatcattcaaaataagctggaactcatgattgcgtttgtgaataaaggtattcgtaataaaaatgagcagcatttaagagattaccaagcagtagttgcagaaaatcaacgattagaattggcctatcagcaagagggacgtttgatggaaaatttccggaatcaagctgtagcaattggtcaaggatggtaccctaaagattattatgcactagatgcagtgaactatcttattcacgcgtttaataatttcaaagcagataatataaaggaagcaattaatctatacgatacatatttagaccgtgcagcccgtcgagcctttgaggcagagatgatcgaacttgaaaaagagcagattattaatcaagaacgaatgatcaagcttcaagaacatgcaaatattttaagtgctagacaaattgcagaaacacaagaagcagctgctgcatcacgtgctgtagcaagtgaacttgagaatattcgttatggaagataagaaatccgggataaataggtagggaagtaaatagaaggaatataattatgaataaaacaacaaagaaaagtattgctatcggtgctactattattgccgctactgctgtaacttcagttgtacaagctgaagaagcgccagttgctcaacctcagacagggacatcagcaactgtttcaaatattgaccatactgctgaggttacaaaagaggcagttgatacagcaaaagagcaagctgatgctgcggctaaaacggtaacagaacaagaaaaggttgtcagcgtggccgatcaaaaggctaaggaagcggaagctgctgaaaaaacggcagcagcaacctatgaaaaaacaaaagaagctgcgagggaagcaactcctgaaaatattgcaaaagctgaagaagccattaaaacaaaagaggctggtgtgaaatcagctgaagaaagtgtaaaaacggctgaagaaggtgtgaaatcagctgagacagcagaagccgaatcaggaaaaaaatatgaagaggctactaaaaaaatagaagatgaaaaagcaaaagtcgcattagccaaggaagaagtgaagaaggcagaacaagctcttaatgagacaacactgaccagagcacaggagacagtgacgattgcgggaaataaactgaaagatgcagagtctgtgaataaagccgctcaagatgaattgactcgtgcaaaagaattcgacgcatcccgtcaagctaaaattgatgaaacaaaatcagctctcgaaaaagaacgtactgaaaagaacgttcctgctcttgaacaaggtctcgctgatgcaaaagctaacgtagaagcaaaagaaaaagctcttgctgaaacaaaagctaaagcaggtgtcgctcaagctgaagttgatgaagctcaaaaagcacttgatgcagcaaacgccgcttatcaagaaaaagttgctaagttgaaacaagacgaagctctccgtaaaatcttcgttcctgctgactatgcaaaacacgatattaaggactacgaatggttcatctctcataaagatgagttcatgaaattgcaaccagaaatcgactgggatgcttatagccaaacaggcattggctctaataaagaagtcgtcgatcttgcaaatcttacatcagctcaacgtaaagaacttgctgaatttacggctcaaatgttgaatgaccttaaccaacaatattggtctaaacgcgaaccaggtaaaacaatagaacctcttcaattgacagtaggtggtcaagaaatggctgacactatcgctcatggatattctaagttctatgcggataatggagggacaccagataagtttaattttcttaaaaattgggaacacctatcttcaattcttggacaatacggtgcgggagaatctcttgggggacttttaccagaatggcataaagaaaactttgacggatacactatgttaaatatcaaacaagacattgcgagcgcaatccgtaaaatgatgtttgccgatggtgaccaatctaacggtcacacaaaacatttaatcacacttcaaggaactggtattggtatcggtataagttctggtgcggttcacattttgtcaacaagccgtgctatgaacgaagataaggcagactatattagtactgatgctgaatacaaatcctcccttacttcttcgattgcagagaaagaacaagcacttcaggcagcaaaagataagaaaatagcagcggataaagccgttaaatctgctgaaaatgatcttgcttctgcaaaatcagctcaagttgacgctcaaacaaaattgaacgctgctcaaaatgctattgctaaagctcaaaaagcatacgatgacgcgcttgcggtcaaagaacaaactccagcagctcaagctaaagtagttgaaactgcaaaagctcttgaaacagctaaagatgaacttgcaacagctaaatcaaatcttgcaaacttgcaacaagttcgtgcacaacgcgaatctgaattaaaagacgctaaagctaaattggttgctcaagaagaagatcttaaacttgctcttaaaacagcaatcgacgctgaaaacgatttgaaagcaaaaggtcttgcaacaactgaagctaaagctaaagttgaacgtgctaaacaagctgtcaaatcagcagaacaagccgtacaagacgcaaaagattatcttgaattgctcaagaatgctcctacaaaacttgctgaagctgaaaaagcactaactgaagcaaaagctaaaacagctgaagctaaagcaactcttgaaacagaagttgcaaaacttgaagctttgaaagtaaaagcgaaagtggctcaagaagattacactcgcgtcttcgaagcttatcaaaaactcgttaaagcgaaacaattggaagaagcaattcgtctcgaacaagaacgtatcaaacacgaagaagaaactcgtcgcaacgaaccagttcgtcatgaatccactcaaaacaaagtgatgaagacaatcgtcccaatcgtaacaggaactcctggtgcaaacacaccagttgcagctcaagaagaacaagcaaatatgaagaaattgccatcaactggtggaactacaagtacacttggacttatggggctagcaatggcagctctaggttttgttggattgaaacgcaaacgcgaatcaaaataaaaacactatttaggctggggaaacccagcctaaaatgatataattttaagaaaaaagtaagtcgaatggggaaatttttatgaaaaaggttatgatttcactactggcgggtgcgtccgttctagctctggtggcttgtacgcccaaacgctatgaacgccaaagtaaaacaaagacagcaacgtcatcatcggttaaaaaagagaagaaggatacaggtcaaaagtattatcaagaggtattagatcgctataagtcttatgcggttgccattcatactaaggacaaaacagctttacaaaatgaactgaagaagatcgaagcaacttcagaagaatatgcgtatgtctttaaccttcaaacacttgggagtaccaatgagtggcaatatgcttttgaggatcttaatcgtgatggtaatgatgaactgctgattggggatggcaaaacgattgctgctgtgtattatttgaaagataagcagccaaccttgctccatgtagcctatgtggcttctgcaggtggctatcgctctagcttagaagtttttgacaatgggcaaatcgtctatgccacttggcaatcccttaatccagaaatggaattgatcctatattcactaggaaaaggggaagccaaggaagaaaagaaagcaaccattcaaattggtggaaaggaaacagcagagcaggctctcggtatttcagccaagaagttagacctcagtaaacttgactggaaaacatttgatggtacaggatactccaaatcaacagctaaagcagaagagaaaaaatcggaaagctttcaagtacaagttagcgtggccgatcttcgtattcgaaaagaaccgtctacttcagcaccctctgcagggatgatctcaaaaggaactcacaccattacggaaaccgtagatgccgatggtcatacctggggcaagcttgaatctggacaaggctggatcgcccttgacttcacaacgcgtgtggatggttctaaatcagcaagcacaagtaagaaaagcagtggaatgaatattcaagaaattcagaacggtgatttttcaagtattgcagggacctggagaaatgggaaaggaatgagtgtaacatttgatgataacggtatatcaaagataaatggtgcaccaacagatcaggttgtagaccgctttaatcatgaatttggatacttaagtagtagtgttcattcaactgccccagctggtgcttcagcaatgagttttttcccagcaggtcaagagtttcctgcatcattaaaatatggaaatttttctgttgataatagtaaggatattatttattggggtcagaatgttatttcagatcaaagcgacttgttctataaggaagactaaaaaaggttagaaaaacaaaaaattatatttgctagtggtctcttcattgatactgagtaaatagatttcctttgatagactaggataaaaaaataggagatattgtgaaaaaatttattattttattcttaacagttggttcggtaatttccctagcagcctgcgccccaaaacgctatgagcgtaagcacagtccagtaggagcttcatcggtcaaaaaatcatctgacaaggcgcaagaaaaagaacagtcagaagaagctaagtcagatgagcatgataaagaagccattgggaccttgtcaaaagcggaccaagcggatatctactcgatcattgaaaacagtgcgtctttgacctattcacttcaggtgcaaccgactcgcttgctagagttgaacaatgatcacggtgcggttgatggttacccgcaagacatgttcattgattactacaatacctatacgccgggaacctataatctgcaagatgtcattgataaattgaatgcagaagagacatcggactctatccgcagtctgtcacaagacaagctgatccaactgacaaacgaaaagaaggacggctggctctattcgacaaaagacaaggccttctacgaaattgtacctggtggtcgtggaggagcgatgccaccgatggaaatcccttcgcctgatgaatgggtggtcaatgaagattcagttgaagtgacaacgactatccaaggtacttccgatccatacagacgttttgtcttgaaacgtaacaataagaactacaagggtggaagccataaaacacgcttttatgtcgacagtacagaattcgcgaaatcttaaaaataaatagaagctatacctggatctaaaatttttatataggtctcttggaagattcgcagaaaaaggcccttaaagcctttttcttttgggcttgaatatgttaaaataaaaggtatacgtgcttggatacaaagatgaggatataacaaatagatgggctcttgaaattcctatctcgttgagttgggtagccttagtatcttgagtaattgaattttggcctcatttcttaggaaaaaagataagcttcctagcactcatcgagtgcggcgtcaccttcctatttttctacagaaatgttcggcaagccgaaccgtccaaaatatcttgatagttgaacacgggctaatcccctagtgaaaaagatagatttcctggtgtgcgtggcacactgcgtcaatctcctattttcatacgggattcttcacgccctttgtatcctgatgaactgaattttggcctcatttcttaggaaaaaagataagcttcctagcactcatcgagtgcggcgtcaccttcctatttttctacagaaatgttcggcaagccgaaccgtccaaaatatcttgatctttgtaggcaagtcgtataattttatcaatccaaaggggattacaatgacaaaacaagtgtttcaaacgacttttgcgggtcgtgagttaatcgtagagactggccaggttgccaagcaagcaaatggcgctgttgtcgtacgttacggtgagtcaactgtcttgacggcagctgtcatgtctaagaagatggcaactggggatttcttcccacttcaagtcaactacgaagaaaaaatgtatgcggctgggaaatttcctggtggctttatgaaacgggaaggacgtccttctactgatgcgacgttgacagcgcgtttgatcgaccgtccaatacgtcctatgtttgcggaaggtttccgtaacgaagtgcaagtcatcaatacggttctttcttacgatgaaaatgcctctgccccaatggcagccatgtttggttcatccttggcactttctatctcagatattccgtttgacggaccaatcgccggggtacaagtaggttatgtggatggggagatcgtcatcaacccaacgcaagaacaagctgagcgctctcttcttgaattgacagtagctggtaccaaacacgctatcaatatggtagagtctggcgctaaagaattgtcagaagaaatcatgttggaagcccttctcaaagggcatgaagctgttaaagaattgattgccttccaagaagaaatcgttgcagcagttgggaaagaaaaagcagaagtagaattgcttcatgtagatgctgacttgcaagctgaaatcattgcagcctacaacagtgacctccaaaaagcagttcaagtagaagaaaaattagcgcgtgaagctgcgactcaagcggttaaagaccaagtgacagccgtttacgaagaaaaatatgcagaccacgaagaatttgaccggatcatgcgtgatgtagctgaaatcttggaacaaatggaacacgcagaagtgcgccgtttgattactgaagacaaggttcgccctgatggtcgtaaggtcgacgaaatccgtccgttggatgcacaagtcgactaccttcctcgcgtgcacggttcaggactctttacgcgtggacaaacgcaagctctttctatcttgactttggcgccaatgggtgaaacgcaaatcatcgatggtttggatccagaatacaagaaacgctttatgcaccactataacttcccacaatactctgtaggggaaactggacgttacggtgcacctggtcgtcgtgaaattggtcacggtgctcttggagagcgtgctcttgctcaagtattgccaagcttggaagaattcccatacgcgattcgtttggtagcagaagttttggaatcaaacggttcttcatctcaagcctctatctgtgcgggaacacttgcccttatggcgggtggtgtgccaatcaaggcaccagtagcaggtattgccatgggtctcatctcagatggaaataactataccgtattgacagatatccaaggtttggaagaccactttggagatatggacttcaaggttgcaggaactcgtgatgggattacagcccttcaaatggatatcaagatccaagggattactgcggaaatcttgacggaagctttggctcaagccaagaaagctcgttttgaaatccttgatgtgatcgaagcaactattccagaagttcgtccagaattggctccaacagctccgaaaattgacaccatcaagattgatgtggacaagattaagattgtcatcggtaagggtggagaaaccatcgataagatcatcgctgaaacaggcgttaagattgatatcgacgaagaaggtaacgtatctatctactcgagcgaccaagatgccatcaaccgtgctaaggaaatcattgctggtttggttcgtgaagcgaaagtggacgaagtctaccatgccaaagtggttcggatcgagaaatttggtgcttttgtcaacctctttgacaagacagatgccctcgttcatatctctgaaatggcttggacgcgcaccaaccgtgtcgaagacttggtagccatcggtgatgaagtcgatgtgaagattatcaagattgacgaaaaaggtcgtgtcgatgcttctatgaaagctcttctccctcgtccgccaaaagcagaaaacagcgaggaaaaaggtgaaaaaactcatcgccatggcgaccgtcctcgtcaccacaacaaagaccacaaacctaaaaaagactttactattacacaaaaagattcagaataatcattagaaaaggaggagcacggtatgggatggtggcgtgaaaccatcgatattgtaaaagaaaatgacccagcagcgcgtacctcgctggaggtccttttgacctatccgggcgtcaaagcactggcagctcaccgtgtttcccactttttgtggaaccatggctttaagctcttggcgcggatgcatagtcagttttggcgtttttggacccagattgaaatccatccaggtgcgaccattgcttctggtgtctttatcgaccatggagcgggcctcgttatcggggaaacggccattgttgaaaaaggtgtcatgctctaccacggggtgacccttgggggaacagggaaggatgtcgggaaacgccatccaacggttcgtgaaggagccttggtctccgctcatgcccaggtcatcggtccgattgagattggggccaaggccaaagtaggagcgggagcggtcgtggtttcagatgtaccaagtgatgtgaccgttgtcggtattcctgccaagattgttcgtgttcacggtaagaaggatgagccaatcattcaccaagaagaagaaaaacgcgaatactatgtgaataagatggagcatgccaaggaagccagtcatcggtcttctagcttgtaaggagatcgctacgtgattcaagcaacccatacattgaatgaccaccaactactggaagcaaaggcccttattgccatctgtcagaagtatgacggaacttttcgggatccttatctctccaatatgctcaattttgatcccgatatgcccgcctttttcctttattatgaaaagggtgaacttgttggcctattaactatctatgcggatgaccaagatgtggaagtagcgattctggtctaccccaatcaccgtcggcagggaattgcgcgtgctttgtatggaagttttgagacagaaacggcctcttatccaattgagtctgtaacttttcagacagagcgtatttttctagagaatcatcctgattttgccagcaattggggactggttgaggatggcgaaacagaaacctggttaggacgtgatcgaaccgcttatgcattagattcccgttcggatgtcggtgtgctcttggcggaaccttcttatcttgaagccattgcccagctccaccaccaaaccttctcagatgaagtggaagcaccggaagtgagccacagatacatttcagaggccttgaaggatcctgatagtctgctttacatattactcaaagaaggtcaagtgattggcgtttgtacggtcgatgtatctggaaaatgcaattacctttatggacttgcgattgctgaagtctatcgtgggcaaggctatggaagctatttggcaaaatccctcgttaaccaactcattgagcaaaatgataaagaatttcagattgcagtggaagatagcaatgtaggtgccaaacacttgtatgaaaagcttggctttgtcaaacagactcaggtggtttatttgaacccaaaagagtagaaacagaaaggaaatgaagcgtgttaaaaatttatgatactatgtctcgtgatctgcgagaatttatccccatcgaggaaggaaaggtccgcatgtatgtttgtggaccaacggtttacaactatatccacgtagggaatgcccgttcaacggtagcctttgacacgattcgtcgctactttgagtatcgtgactacgaagttgcctacatttccaactttacagatgtggatgataagatcatcaaccgtgccaaggaagaagggattacgcctcaggaggtggcagacaaatatatcgctgcctttcgtgaagatgtgacggctcttggagtgaaacctgcaacccgtcaccctcgtgtggttgagtttatggatgacatcattcgttttgtcaccgacttgatcgaaaaagactatgcctacgagagtcaaggggatgtttatttccgtgtggaaaaatcccacaactatgccaaattggctaataagaccctggaagacttggaactaggcgcttctggtcggacagacgaagaaacggctcgcaaggaaaatccggttgactttgctctttggaaagctgcgaagccgggtgaagtttcttgggaaagcccttggggacctggtcgtccgggttggcacattgagtgttcagtcatgtcaacgggaattttgggcgataccattgatattcacggtggtggtgctgaccttgaatttccgcaccataccaatgaaatcgctcagtcagaggccaaaacaggcaagacctttgccaactactggatgcataatggctttgtcaatattgacaatgtcaaaatgtccaagtccttaggcaactttatcactgtgcatgatgcattgaagaccattgatggtcaagtgcttcgcttcttctttgcgacccagcactaccgcaagcccattaacttcacagaaaaagcggtacgcgatgcggagaccaacctcaagtatttaaaaaatacctatgagcaaccgttcacaggaggagtagattcagcagacttgcaaggctttgtggacaagtttatcgcggccatggatgaagatatcaatgcagcgaacggcatcactgtcgtctttgaattggccaaatggatcaattcaggtcactataatcaagacgttaaggatgccttgaccaagatgttagaagtctttggagtggtctttgtcgaagaagttttggacgcagatattgaagccttgatcgctgaacgtcaagaagcgcgggctaagaaagattttgcgcgagcagatgccattcgcgatgaattggctgcacaaggaatcaagctcttggatacaaaagaaggtgtaaggtggacacgtgattgatgtcaatctaatcaatgggatcgcccttgcctttgagggagatgcggtctattccatgtatattcgcaggcacctgatttttcaagggatgaccaagcccaataagcttcaccaggctgcaacccgctacgtctctgctagagctcaggctagcttgattgaaagtatgctggagcaagaaattctgacagaaaaagagttggagatctacaagcgcggtcgcaataccaatagccataccaaggccaaaaatgcggatgtcgtgacttatcgtatgtcgacaggctttgaagcggtcatgggttacctgcatctgacagatgaaatcagtcgtttagaggaattggtagcttggtgtatccaaaaagtggaagaaggaacaaaatagtgaaaaatatcagagagtggttccctcaggcagaggtgacggatcaccccaatccaccagctggttatgtagccattcctctgcaggcccagcaatggttgctactgaaggaagaagagctaaccgaacgagagaaacagttgattgcctggttgggcagtgaggaagattttgaccccaacccttggtaccaatacttgattgatggaaagggagaagcccctcaagtcatcaaaaaaatgcaacttgtctattgccacctctcgcactcgacagcggaagggacggcttcctggttagagatgatgcagacactcttgcccaacttccgagcaaccctgcaactgagtggacaggactatgtactcattctggaccaagaccagtctttacctgtggccgatatcttaaaagataccgtctctgccatggagtatgacttcaatattcgtttatctatcttggtcgggcaagtatggaccgagtctaaagacgggaaagtgtctccggtcatccgagcagaacgggcggtctttcgagcctggattcgagaaggtcatcaaggtgtttatcgcttttctcaactctacctatggggaatcgagcaggcagatttggaactccatcctatcaaagaacgtttgcatcagttgattggaagtcaagaccagttgcaggacatcattgtcgccctctgggacaacggggcagtcgtcaccaaggcggcccagcaactttatctccatcgcaattcccttcaatacaagattgacaagtgggaggagttgacgggtcttcagttgaaaaatctgacagatctagccttgtgctatcatttagtcttacaagatgtaatttaaacggaatcaatcgagagttttgtgcaacttgcacaaaactctttttcttttttgtgagacttgccatagatttgtaaaacgttttcatttacaatagaactataaaaatcaaaggagtaccatcatggtagaattaaatcttaaaaatatttacaaaaaatatccaaacagcgaacactactcagttgaagacttcaacttggacatcaaagacaaagagtttatcgttttcgtaggtccttcaggatgtggtaaatcaacaactcttcgtatgatcgctggtcttgaagatatcacagaaggtgaatgttcaatcgatggcactgttgtaaacaacgtggcacctaaagaccgtgatatcgccatggtattccaaaactacgctctttacccacacatgactgtatacgataacatggcatttggtttgaaattgcgtaaatacagcaaagaagacatcgacaaacgtgtacaagaagcagctgaaattcttggtttgaaagaattcttggatcgtaaaccagctgacctttctggtggtcaacgtcaacgtgtggccatgggtcgtgcgatcgtccgtgatgctaaggtattcttgatggacgaacctttgtcaaacttggatgcaaaattgcgtgtatctatgcgtgctgaaatcgctaaaatccaccgtcgtatcggagctacaactatctacgtaactcacgaccaaacagaagcgatgacattggctgaccgtatcgttatcatgtcagctactaaaaaccctgctggtactggtactatcggacgtgttgaacaaatcggtactcctcaagaagtatacaaaaacccagtgaacaaattcgtagcaggattcattggaagccctgcaatgaacttcattaacgtgaaattggaaggtggacacatcgttgccaatggattgaacttgaaagttccagaaggtgctttgaaagtcttgaaagaaaaaggctatgatggtaaagaattgatctttggtatccgtccagaagacgtgaatacagaagctgctttccttgaaacattcccagaatcagtcgtgaaagcaaccatctctgtatctgagttgcttggttcagaatctcacttgtactgccaagttggtgacaacgaattcatcgctaaagtagatgcacgtgactaccttggaactggtgaaaccatcgaacttggatttgacttgaacaaagctcacttcttcgacaaagaaactgaaaaaacagtatactaatacgtactgacactgtagagactgagacgatatgtctcagtctcttttgttttaaggagacaaaacatggaaaaagactggtggaaggggaaggtcgcttatcagatctacccaaaaagctttaaggatagcaatggtgatggagttggggacttaaaaggcatcacggagaaactagattaccttcaagacttagggattgatattctctggttatcccctatttacaagagtccgtttattgaccagggttacgatatttccgattattatgccattgatcctatttttggaacgatggaagacatggaagagttgatcgctgaaggcaagaagcgaggcatttccatcattatggacttggtggtcaaccactgctccagtcatcacgaatggttccaaaaggctttagcggatccagatggcccttatgcggattacttttatttcatcgaaagtgacaaggaacccaacaactgggaaagttactttggaggcagtgtttgggaaccggttcctggcactaataaatactatctccattctttccacaaggatcagccagatctcaattggcaaaatcctatcttgcgcgaagagatttacaagatgatcaactggtggttggacaagggaatcgcgggatttcggatcgacgctattatcaacattaaaaaagatttagaatggcgttcgcttccgtccgatcgtgacaatggcctggtcccagtaccggagtctctggtcaatgcgcaaccgattgaacctttcctgcgagagttaaaggagcggaccttcgccaagtacaatgccttcacagtaggggaagttttcaatgaaaccgacgaagaattgcatttcttcattggaaaagatggtgtcttctcttccatctttgatttcaaacaaaccatgctgggtcaggaaggaaaaggctggtttgaccatagtcttccaacagcagatgaactcaaggaaagtattttccaagcgcatgagcgcgcggattgcattgggcttctatcgaccatcattgaaaaccacgacgaacctcgtggagtgtcccattatattgcggaaggtccggtaaacgataccagtaaaaaggccttgggaaccattcaaatcttgcgtaagggaattccttttatctatcaaggccaagaaattggaatggaaaaccaagtatttgaatcggtggaggactttgatgatatcgcgaccatcaatggctaccatgtggcgaaagaagctggcttgagcgaggaagaagccttagcagcgattgccaaatatagccgggataatgcacggacaccgatgcagtggtcagcagagccaggattaggctttagtgatggaacagcctggttgatcagtcccaaaccaaatgttgccatcaatgtggaagaccaggaaaaggatccaaattccatcttgaattattaccgccagctgacagccttgtatcgccatcccctttatggaaataccattcggtttggggatatgatcccagcttatcgagaccgtgagaatatcattgccttcgaacgccgtggggacaagcgtctcttggttgtcagcaatttccaaaatcgccaggccaccttggagttgccagctccgattaaaacagtcgttttaaataatacagcaggattattccaagaaggagaccaagtgctcgaattgaccccttaccaaacggttgtgttggaattggtggaataaggagaacctttgcatcagtgttaggatttaatgtagaatagtatgttcattaaatattctggagaaatttacaaaagttttctatactttagaatcagtcaagtataaactgaaactttccgctgtgagaaaagtgtttgaaacattattgtttcaaacactcgggagttttgagagtaaaacagttcggggaactgttttagcctgagcctaaaaattaaaaagcgaaggggtccaaaacgaattgaacacgggctgcggattgtgtcaaaaagcgcaaaatacattagtactaaatcaaagacacagtagctgattgaattcttctctcgccttttagctcgaaagaatcctaatcagccttgtgggggcaggacaatgaagcaaacctatacaacagtgcttctgtcctgctccctattttgactgtatccgcagacgctctttatattttaatcagtcatggaacttcctgtattgctgaaatcatccaccggataatttcacctaacctccgtactcacctaaggaaagttttgaaagatattttatctccaaaaagaaccttcgcatctgcgaaggttcttttcatgtcatccaagtctaaacctggaacttactcaacttctttctttttcaagaggaggaagccgccgctaacggctagcaagaagcttgaaagaatgaagtgtgcagttatgtcttctccagtttgtggcaattgtgccttgtctggactttcttggaagctttgtcctacttggtaagtcaaggcttgcacgctttctttattattagttgtcatttctttttgtggaaggagcactttaggagtatccttcttggctaagattggctgtggattgcttgtttggttatgaattggaaccaccacttgatctggttctttagctggaacgtaatccatcaagcttgccaacttgctgccaaagatcgcattggttacccagcggaagaagtggacagggtgttgacggttggttggatttcctgcatagacaaagagtggttgtcccatcagttccccagagatggccatgactttgttggccagaacatcgttatgtggccaccaacctgcaatataataatcgctcggagcgatgctcatcaaggtcttgaaatgctctggaaccttttcaatccagtttcctgagttggagtagaagagggtattcttcttgtatccgctagtcaatggatcctggtcatcaatgatcgctttcatcaagccttcgtagtcactaccgccttttagtttttcagcgtcaaatcctgtaagaactcccaatttttccaatttttgcatggcttccccgccaatgacaagggttggtttcttgccaaaaatggaagcatcaaagcggttgctttccaaaataataacatccgcttcttctggcgtattgacgatttggaagcctaatttttcaaggaccagactagtatgagcaggcgcatctactccagcccaattatagtggtagttcggagagtagaccttcatcggtttcaaggttggtccgcttggtaccttgtagagggcatccccataaatggcatagtttggtaagagcgaagcaaaggtatcgcggtcaacgatgtagccatcgtctgttaggtagacagattttccttgtgcgatggcctggttgacagctttaacggcactggctgaggtattggcaatgacgtagtaaggcgctttaggatcgatctcagaggttctagtcgcgcgagtggtggtgacttctccaagttttccagcaaagagaccgtctttaaacacaggttctgccttgaagcctttcatatcagggaagttaacgagaagttccgcatacatggctgcccaggcggattcgttagaccctttatagaggatatggttggcatagccccgtttagcttgagccatgtcaatgaccaggtctccttttttgtaggtacctgtatcttctttgagttctttgacgaggacaccattgcgtttgaagtagtcaatcatattgaaggcttcttgggcatcattgtccttgtcgaggcccattgggataacgtagtagtctgggaagaatttcggacgaccgtttttcacccgtccaacgatttccccatttgggccgaccagttcattttcggcttttggatcttcggttttattgagaccgcgcaggtagaagttgagacgcatctcaaggagacggtctggatcttggttgaggaagtcaattccgcctaggacagcattgcgacctgctttgtaggattcttcatttccttctggaatttcgatggtatggcctaagataccatggtagacagcataaacccctgtatagccagagaaggagtcatcccagccatcgccccaatccagttttggaatgatgtaactattgtatttagaattggcaactcctgcccgtcccatatgatgggcattttctagcatcaggtctgacagaagatcgtattcgaagttcggatcatgtggtggcgttgcaggttcgattaagaattctttgacaaaaccgtgtaagtcgtagagagcgatcggattccatttgttgatcatttggataaccgtgcgaacttcagggttggtttggtagctggcatcccggtttggatcgagcccgtttgctagggcccgcaggttgagagcatccccatctgggttttccgtgaagtcaaataagaagatgaatttattgagcaaggttggaatatctagcgtgactgttttagcatttccagcttcatcggtggtgttaaaggtcaccttttccttggtcgcaaaagtattgaagaggcctgtgatgatatcaatgcctggctgttcatccgcgtgggtgttgtggactaagacaggtaatttgtaatccaaggtcttgtcttttagagcggccagcatttcgcttggcttagtcaaagctgtagggttggtactagagaggtagtgatcgatgctggcttggtccttgctcacgatccccatcttcatatcccggccttgggcactcttgccaagggtttccagctgcaccaaacgatcgggtttcgcttcttccttggatttttcgatagcagctagcatctcttcatgcgtatggtagtcctgataaggtcgaaaaacaagggttttattgatggtcacacctaagtctgcattggttccgaccagctcatggttgccgatgtaattgcgataagtccggcgaatattatttgggctacgaaggctaagatcttcaccaaagagatcctgcacgtcaatgtggagatccaaatcattgccgtttgctgtctctgtgatagtaaggaatggatccttgctcagtgttcctgtctccatatcccaggttttccactcagagagtggcttattgtctaaggtccagttgatcttgccagcagcttgagctttttcttggactttgtcatcaatcgtgctcttttcagagagataaatggtgctatccgccaatcgagtcgcttggtcagcggtcgttgtcgcacgggtagtgcttggactagcggttggagcaacttctctagtagaagccacatcagaagtcgctgctgtttctgcaggactagcaggagttacttctgtggctgcagcgggactagtcgtctcggctgtcacaggttgctcagtagcaggtgtcgcttcaaggatcgtgctaggctctgtttgaggcgcttctacgctatcggctgaaacttggccatgaccgataacggaaagcaagacagccgctgagagactgagtgttgtagtgtacaaatgtttcttatacgaagacttcatatagaagaccctccttaaaaaagttattttccagttctagtataccattttaggaaagcgtttacaacaactgccccaataaaaaagcctttgcatttggcaagggcttctttgtctattctgtttccttatgaaattgttggtaaaaatcaaccttgatttggataaaagtttctaagtctcttaagagttggagcaaggtggcgcgtgtttcgaattcttcacgggtcttgggaagagggcgttcgcggaagatcgccaaataatgactaatatcatctagaagatcttgggcaggattttcctggcttaactgttgagccgtcttcttaaatagttgtgccaggattatgctttcactcgccgctaactgacagcgatcgacgttttctgccatatctcgcagaatatcgttttgccgcttgcgcatttcgaagtagtgaatatggtagttggtttggtgaaagaggtggttggaatggtccagatagactagatttaaagcgtcttctaggataccatccaactccttgatcaagcgagcatcattgcgaccatcccctttaccaagaaattccgcaaaacgactaaggatcttctttagttggtcttcgacaacatcatggtaatgatcgatcgcagcctgattagaaggcatatagagattggccagcagggcaaagctggtcccaattaaaaagagagcaagttcattgagcaagagcccccaggaggtagactgctcaatcaagaggtgggtaaccaacaccgtactaggggtgataccgatctgccaacccaatagaaaggcaccaggaacatagagagcgataaaaactcccagtgcccaaaggttaaatcctaaaaaggaaaaggcgagacttccgatagcaagggccagcaaggtcgacataaaacgctgataggcttgcttgatcgtactgcgacgcgtatcagagatactcaagatggcaatgacgccagctgagatggcataggtcaagcccagagcataagcaagggccgctgctaaacaggtggccaaggtgagcttgatggttcgttgaaaaagaggcatggcttcctttctagttcggttcgttcattgagatagatttgatttcattatatcatgaattggcctcttcctcctttcttgtggtatactagttctatggaaaataacgatatcgtatacggtgtccacgcagtcaccgaggctttacaagccaatacaggcaataaattatatattcaagaagacctccgaggaaaaaatgtcgacaagatcaaggccttagcagctgagaaaaaagtgtcgatttcttggaccccaaagaaaaccctgcaggaaatgacagaaggagctgttcaccaaggcttcgttcttcgtgtggcagcctttgcttacacagacttggcagcgattctgaaacagacagcccaagaagagaacccgcttttgttgattctcgatggtttaacagatccgcacaatcttggatccatcttacgtacagctgatgcgaccaatgtctcaggcgtcatcattcctaagcaccgggcggttggggtaaccccagtggtgtcaaaaacttctactggagcagtggaacacattcccattgcgcgtgtgaccaatcttagccaaaccttagacaagctaaaggaagagggcttctggatctttggaaccgacatgaacggcacgccatcgcaccagtggaatacggctggcaagttagccttgatcattggcaatgaaggaaaagggatctcagccaacatcaaaaagcaagtcgatgagatgatcaccattcccatgaatggtcatgtgcaaagcctcaatgccagtgtggcagcagccatcctcatgtatgaggtctttcgcaaccgactataattctagaaaggcaatgatatgaaacgaaaaatcttattggttgacggctataatatgattgccttttggcaggagacccgccagctctttcaaaaaagtgagctcgatgcagcccgcaatatcctcctgcaaaaactgagccactatgctagctttgaagggatcgaagttatctgtgtctttgatgcccagtatatgccaggagtgcggcagacctatgaggagttcaatgttcaggtggtctttaccggtgaggatgaaacggcagatgactatatcgagcgcttggcggcagagcttaacacgcccctccaccaagtatcggtagcgaccagtgacttaaatgagcaatggaccgtctttgctcaaggagctcttcgggtatctgccagagagctagaaaaacgggtcgcagtcgtcaaaggaaacctcaatcaagcgcagcgagtggtcaacgatcaaaaaccacccatgcgaccactcgatcacgaagtattgcgacaattacaagaaatgatgggagacaagtaatgacatttgctattttaaccgattcgaccgcagatttagaccaaaactgggccaaggaacatcaggtgaccattcttggcttgaccattgagttagatgggacggtttaccagacagtaggcgaagctcaattgaccagcccggagcttttagaagccatgaaaaatggagccaaaccgacaaccagtcaggtcaatgtggggcaattccaggagacctttacgcactttgcaaaagaaggaacacccctgctttgtgtggccttttcatcagtcttatcagggacctatcagagtgcagtcatggcacgagacctggttttagaagactatccggaagctgtgatcgagattgtcgatccgaaggctgctgggattggagagggctacctggttatgcgggcagtagctgcgcgtgatgcgggccgttcattagcagaagccaaggaagagatcatggacctagcgccaagactgcggacttatttcctcgtcgatgatctctaccacctcatgcgtggaggccgtctctcaaaaagtgctgcgatcatgggaagtttggccagcatcaaacccattctttggattgatgcggaagggaaattagtgcccattagcaaagttcggggacgcaaaaaagctgtccgagaattactggagctgatcaaagcagatatcggtgaaagcacagccttggtttcttataccaacgatctagaaggagcagaagcattgaaggaagaaatgcttgcgcttgaagggatcgatgaagtcctcgtgatgccccttggaccagttatttcagcccacgttggcccaaattccttgatcggatttgtcattggaaaagaaaatcgcaaataattttccaaatcggttgacttttatcttagaattttgatacaatagtaggcggtattgtttaccccatttgtaaggccccggaacctttcaaataacttgcggaccggaacatccgccctgtaaacaaaaacgacattcatataggagaaatcatgaacaaaactacattcatggctaaaccaggccaagtagaacgcaaatggtacgttgttgacgcaactgatgtacctcttggacgcctttcagcagttgttgctagcgtgcttcgcggaaaaaacaaaccaacattcacacctcacactgatacaggtgacttcgtaatcgttatcaatgctgaaaaagttaaattgactggtaaaaaagcaactgataagatctactacactcactcaaaccacccaggtggattgaaatcaatctctgctggtgaacttcgttctaaaaatgcagttcgtttgatcgagaaatcagttaaaggtatgcttccacacaatactcttggccgcgctcaaggtatgaaattgaaagtattcgttggagctgagcacactcacgctgcacaacaaccagaagttcttgatatttcaggacttatctaaggaaaggaacaataaagtatgtcacaagcacaatatgcaggtactggacgtcgtaaaaacgctgttgcacgcgttcgccttgttccaggaactggtaaaatcactgttaacaaaaaagatgttgaagagtacatcccacacgctgaccttcgtcttgtaatcaaccaaccattcgcagttacttcaactgcaggttcatacgacgttttcgttaacgttgtaggtggtggatacgcaggtcaagcaggagcaatccgtcacggtatcgctcgtgcccttcttcaagtagacccagacttccgcgattcattgaaacgcgcaggacttcttacacgtgactcacgtaaagttgaacgtaagaaaccaggcttgaaaaaagctcgtaaagcatcacaatttagtaaacgttaaaacttatttaaacttattgaaagcatttcgtatcaaaaatacgggatgctttttctgttcaccccaaatttttgtaactaggtgatacttgaaattaatacaaatttggttgtttttgataaatctaagcaacactaaatgatgaagtgaaaggggatgaatctttgatagtattcatttattgtgaaatatgatatatttattaattagatggatgaatacttctagagttaaatatagcataatagggacagactttttggtttatttttgtttgtagtcggattatgaaagaatatccaatattatgcgataagatagaatgttacaaaaaagaaaggggatgcaatccgatgaagaaagacagattaattgtattgacagatgctgttctagcaattattatgaccatcttgattttagagttagaaaaaccaacaacaccaagtcttgaagctttttgggatttacggcaaaatttctttgcttgttttctttcctttttctggttgggatcgttatggatggcactaaacacattatgggaaaaggttgagaaaatttcctcagaaattatttggtggaatttgtttctactcttggagcggcaggagttctctttggagaatttcatgccatccaagataccagtctgaatgatgtggtggaccggatctatataaatgtcaaggatttaccgtttcagtccttgggagctttagctaatatcctgtctgatgttaagaagggactgattcaagacagtcatatctggtctttcttccagtcatttttcaaacaatatcagttgataatcagcttaaatcagatctatcagtttgtctatctttctctgatggagatcatgtcctatcttcactttgattattggaaaaaacggctcggtcaggagctagtatgaataaggagaacaaatgagacgtttaaaaatgttatggcatattatacaggttacgggttttactcggtttgctctgagttttgtgacctttgtttttgggtcaggaggcgtgcttttcctagttgaacctgctatcacaaattacggagacggtctttggtatgcttttgtgacttcgacgactgtcggctacggggatctcctagctgtgaccttgattggaaggattaccagtgtcttcttgacgatttatgggctcatattttttggctgtttatcagctgttattattaattattataccgatttaaataaggaaagaggagaggacaaatgactgccaattattcaacacgggaataccgtgagaaattatacgatgaccttcatgttcgattgagagatacagcgattttgatgtgtgcaatttttattgcctctatcggtctaaatatgaattcaacagctgttattattggagccatgttaatttcacctctcatgacaccgattgttggactgggattcggtttagctatttttgatacgcgtttaatcaagcaatctctagaggttttattgactcaagtgttggtcagtttgcttgtctcgactctgtatttctggatttctcccttgtcttatgcaagtagcgagttgatcgcacgaacctctccaaccatttgggatgttctcattgctattgctggtgggattgctggtgtgatcggttcaaggaaaaaagaagcaaacaatatcgtgccaggagtagccattgctacagctttgatgccgcctatctgtactgctggctatggtttagctaatgggaatgtacgatttttattgggggctctctatcttttcttgatcaactgtgtctttatcatgctagccaacattgttggaacaagaattttgatgagaaaatctcctttaacttcatttaaagagctgagcattaaaatgagaattggcttgatttctttgattgtattgttgattcttccagctagctattcggcagttactctgacaatagaacaagcgcgcaaagaagggatcaaacagtttgtaggaaaagagttcgccaattatacggttattaatcaagtctacaagtcaagtaacaatgaattggtcttgacggttgttggagatccgatttcagaagaagaattagaaacactccaccaaaaacaagcctcttacggtattcaatctgttcaattgaaagtgaatcaagttcagaactcgccaacattagatagtgaagcgaccaaggaattttatgaaaacattgacaagtatattgatcaaaaactctctgaaaaagattcacaaaacgatctcgtaaaagaaaatgaagcagacaaggattgaggacaatgaactgaatcggtttttacgccgtgtttttcttgtatcttcctctttcttacttatagcaggttgtttttgcttgaataagaaataaattagaagttctatcatctaagaaaaatgatgaaaaaaatcatttaactaatggtgtgaacgtttagtgtttatcagctccattctctgtaattttgggggtaaaatccacaccatttagataaaattagttgaatttgattggaaaaacgcttttataaaagcggagaaaagtcttgatattacgctgtttttagtccaactgaaattcatactttccaaaccaggcttgaagaaagctcgtaaagcatcacaatttagtaaacgttaaaacttatttacagatattgaaagcatttcgtattcaacatacgggatgcttttctgtttggcttaatgttacaaatttgcaattatgttataataagtaatatggttgcatgaaaaaatggtggataatcaattagatcggaggcgactaatgagaaataaggttactaaaataattgctattgtaatcattcttatatttggaggaacatatatgtataataagctgactaaaccaaatcttggccccaaaacagccaaactctatcagcatggctttcgtttgctagaagagcaaataggaacctacatcaaagaacactatagaggtattgagaagattgaattttccccaatatacgttacagaggaagggtcaacattctcaaatgcgtatgtccgtccaactatttatgataagtatggaaataaggctactctaggaactccaattaataactataatccaagcagttttggtatcgtttctcatgttcttctcaattttgatggaggcgggaatgaagctatagatttaaaggactccaatggaaataatatcgatgtttctaaagcacagcacctgcctgatgaagcaaaactaattagagaatcctctacggatggtaatattaaattattggttgataatggtcaattaaaaggggtagtaaaagatgaaaaaggaagtccatatgctgagattgtttataatgatgacttaagaaaaggagatatataatatggctttatctaatgaagaagtacagagattacagtttggtcttaaaaataatgttagggaaaagccaggaaaagtactaaattataaaataaatggtgaagacagatatttccaaatcgttaacagcatggatgctactacccaagcaattgcctttgtccctgttgatgatccaaaaggtaataatccaaattatcaagaaacaacgatagttgttgctggaactcaaataccctttgaaaattctaaagaattggggaatcaaccttatttttttaaaaagaatagagatattgttgattcgtctgaaagagcattctttgctagtggggcgtttggtatatttccaggaatgctaactccccaagcagatgatattgatatgttttatcaaattactgaagagaaaataaaatctcataatggtataatttctaatatgtctgggcatagtcaagcaggacctggcgtagcttatacagcttcaaagtatggccttaaagagaatcggactattaaagttacaaatttcatggatttcgcagctaaaaaagctgtagatacaggtggtatttcaaaggaacaggtagcctatcttaataagaacgctacgatctatagagatagtagaagggacgttgttaaacttgatggtaatggtggtgcagttccctatggaaaaacaatgatgtttgaagttattggagacgaagatggacattcaccacgaacacctgtattaaagggaaatgctttagatatcgattattattataaaaaaaaccttttcgcctctggcatgactgaaaagcaggtccgaaagatagcggaatataaagcaaagaattttaaaccaaatttaggaattgttaattatgggttagaagatatttttgataggccggagttttatattaacgggtatttaaataattacggtccttttgctcctgaaccaactaaacaagatttaatcactttaaatatcaaacaaataaaagagataaaggcctctttgaagtctagttctggtagtaaaaaaattagtttaagagaagaattggtccgagtaagtgcggaaaccacgaaacttcaagctgaggtttacgaagaagaaattaaatcaaaaattgaatctgaaaaggaaaaggtttctcaaaaaatttcatccctcaaatctgaagcatatagtattgctcgtcacttatcatctagtgaagtagaggttctattatctgaactaagtttggatactgcatggaacagtgggaaagagacaaaaactatcacttcagcaagcgattataggaatagaatgtctcaaatttcagataatctgaataaagttgctgatagaattattgaaagtgatcaaataggtgccaagatttttagcaattaaaaggagttaatgaatgattgaaccgaatactgaagatcgattagaagcagagcgcataaaaactgaatacatgaaagttcaagaacgattggcaatccaggctctagtttcagcaacaaaaggtgtcctaatggctgaaggggctattttacaaacttggctggctaatcaggcgtttaaaatgcagaattttgccacttctcaagtacctgcttctctagaaggaggattaactgggggtgctgctgatgcaattaataaaactttaactgaagtacctgaacctgatctgtccagcccaatactttaggagaatacatgaatattaatgataaaattaataaagtcgagagtgatcatcaagctttcagaagaaaagtagcagattatgaattagattatcaagatatgaagcgagatgcaaaaagactatatgaagatataactgactttatcatctcctattgtcataaacataatcaagaacttccaatacatgaattgcagcaattagaagaaaatagagataattttgaaaagagaatttctaggtttgaaactagattaagccaaacgtatcaggaagaaaataaactttataataaaagcatggaatctcttgaagaagaaaagaagaaggtgtaactcctatcactatttataatactttatagtaatactacttgctccaattgtccgaaaatttgtgtaaattccaaattgaaaatgaactaatttttgatagcgattccttttatttataaatacgtcaactcgttgtaaagattgtttgatcaagattttttggagaatccagatgttgtttttttctctacctatttttctaaaactgagaaaaatctgatataataagctttgtaggtgtgttatatcaatacttacagaactaaactattcccctatttaaaaaatattgattcaaattttatgaaatgaataagtagttttagttctgaaaagacttgatattacgctgtttttagtccaactgaaactcatactttccaaaccaggtcttaagaaagctcgtaaagcttcacaatttagtaaacgttaattcgaaagaattacaatatttacaaagaacacctttcgaggtgttctttgtatgttttcatactaaattgtggcagttgatgtagttgttgtggctttagccacttacaaatacggctgcaattcgacgaagtcaattgcctctaaacgttaattcgttactggaatacagaatacaagcgaaaacattttacatcttgcaaggtgtttttatctatgagaactggcggtgcgtaattaggatagctctagcgactttagtcgcgtagagatatgctatgcacagttgccccaagaaaacaagcgaagcgatatttgaatggatagcaaccactgcacgcaaaatgttaattcgaaggaattactatacttacaaagagcacccttcggggtgttttttctatacctaagataaatggaaaataaaaaaccaccctatctttcacagtcaaatgtgactgtagaaaatagagtaggtctaggatgttaaagactatttgtcgtctttatgaaagatatttttaacgcccttgatagctccttcaacagcttcttttgcatcttcagcaacttcttttgcttttgaagcaactttttcagcagtgccttcagcttctgtttttgtatcgccggttaatttaccaaggccttctttaacagaaccttttgcttggttcaatttttcttctaatgacatagcgtcacctccatgaagttagtagttttttctctgaatacaatactgttgatttaaaaaaataaaaaatatttgtctcagattagaatgagtatattctttttaaaatagaaagtcaaatttttgctacggctaaaaaacaggatcgctttccggtcacgaataatgaccgactaataagtcacgatatttcgtttttccagcaaagatttgaaacgaaagaagcaaaaaacttttctgtctccattgaattacatggtataatggtcgtgaatggagacatcgtaacgctgttttttgaaaaagagaagataaatatgaaaagaatccttataacctatcctgttatcagtactttagctctaatctgtttgctgctcggtctattgacttccttttatggggatgctatgtatgacctattggcttttcattcaaagccggtgtatggttggcaatatgttagtgggaccctgatgcacggtagtaaaggagcccctatctggtttttatgggtccatttgttgttaaatggactcatgctccttcccttcggaggactgctagaaagaaaaataggctctagacaagtcttgatcgtttttgtgacggcgacagtcctctcttccatcgtttttcacctcttaacccaggagcaggacattcaggcaacagggatctctgctgtaggatacgcctttgtgaccggaggagtcctgctcctgccaaagatgtggaaagaattttcactcaccgtaaaatggttttatctattcttaatttttctatctggcctcatgttcttaccagcaatcaccggatggatctcaacgctattgcatctttcaggggttgtgagttatctattggtttttatcggaagtaaagtcttggaggggagaagctaactattaagacggctcctcagtaaggttttcatcgtacttccttgactcttcctttaccaggccgtataatattctatatcaatgaagaaatcaccttttgtcattgtacaaagggtgattttataacgaaaaaaaggagacacaatggggtatatctctactattaaaacggctgttcagctctttcctttcctggcatttttgctgaccttgccctacatgattttgaattatcgaaaatatggttcggtcaataaattgcgggtgctgattttctattcttttatgctttacttgatgacggtctatctcttggtgatcttgcctctgccggatccaagtaagattcatactagctactcggaaatggtcaatctccatccctttgcttttgtggtggattttttcaaggagagcccctttgatttagcgcagactggtacttggattcaagctcttaagcatccaactttttatgtgcctgcctttaatgtcctgatgttgattccttttgggatgtatctgcgctattatttcaagtgtggttttaagaaaacgatccttctggcagctctctttagtctctttttggaactgacccagttatcaggtctctactttatgtatccgggtccttaccgcctggcagatgttgatgatattattcaaaatactaccggtggtggagtgggttatctgctcggttggttcctggtttggttattgccgacacgagacgaaattgacgagcattctttccgagtaggaacgaaagtatctggttttcggatgggtcttgccttcttgatcgactttgtaatgctatccttgctttacgcggtaatcgagcgtttagagacgattccttatgtagcgattttggctgtttattttggtttgattcctttgtggcggggcaaaaccttgggaatggctttattgaaattccgcttgcattttgacaagcaaaaatggcttcgcaccatctggcggggaatcctggtagtaggttatttctatctgattcctcaagggttgttctatttgatttcgctcttgaatagcgatttgacggacaattctctcttaaccctgtccatgattttattgctcttctttgtggttttattgtacctgattctcactcttgccatcgtcttgctcaatcgtcgctttccctttgaccgtctagctgtggctgagtatgagagtacggtgcgcgtgaagaaagagctcttaaaagatgaaactgaatcgtcaaaataaagagagtgggacagaaatcggtaattcgttagaattcgatttcgtcgtctcacctccgcacagttgagtagggctgtaaaagctgatgaaatcagcgtagtagagcccactcaaccactgcgtcttgctcgacaatccaaaaaaaataaagaggctaggacttttgtcccagcctctttatttttttatacacgtttaatatatccgaacattcccagttgagaagggccattttaaggggattgtgctacaatggaagcaaatagatagaatggagcagtgaaatgaaagcaattattacagtcgttggaaaagaccaaaaaggaatcgtagcgggtgttgcaacgaaagtggcagaattaggactcaatatcgatgatatctctcaaaccgtattggatgaatactttaccatgatggcggttgtatcgtcagatgagaaaaaagatttcacacagctccgttcagagttggaagaattcggtcagtctcttcatgtaaaaatcaatatccaaagcgcagcgatttttgatgctatgcacaatttgtaagataggggttgagaatttatggacattaaacaggtaacagaaaccattgccatgattgaggagcagaacttcgatgttcggaccatcaccatgggaatttcgcttctcgattgtattgatccggatatcgaaaaggcggcagaaaaagtctacaataagattgtgacaaaggccaaagatttggtggctgttggagatgagattgcggcagaactgggtattcctattgtcaacaagcgggtttcggtcactccgatttctattatcggggcagcaaccaatgcgacagactatgtgccctttgctaaggcactggatcgtgcggccaaagaagttggggtcaactttatcggtggcttctcagctcttgttcaaaaaggctaccaaaagggggatgaaatcctcatcaactccattcctcgcgcccttgcagagacggattttgtctgctcttcagtcaatatcggatcgaccaagacggggatcaatatgacagctgtccgagatatgggccgtatcattaaagaagcatcccaagcagatccaatggggcctggtaagctcgtagtttttgccaatgcagtagaagataatccttttatggcgggtgccttccacggtgtcggtgaagcggatgttgtcatcaacgttggggtttcaggaccaggtgtcgtccaacgggcgattgaaaaagttccaggagctagctttgatgtattggctgaaacagtcaagaagacagctttcaagattacccgtgttgggcaattagtggggcaaatggctagtgaacgtctcggtgttgagtttgggattgtagacttgtctctcgcaccaacaccagctgttggggactcggttgcccgtgtccttgaagccatggggcttgaagtggtaggaacccacggaactaccgcagcgctggctctgctcaatgaccaagtgaaaaaaggtggcatcatggcttgtaaccaagtcggtggtttgtcaggtgccttcattcctgtctcagaagatgaagggatgattgcggcggtccaatcaggtcatatcaacctggaaaaattggaagccatgacagccatctgttccgtcggtctggacatgattgccatcccagctgatactccagatacaaccattgcggccatgattgccgatgaagcagctatcggggtgatcaaccaaaagacaacagccgttcggattattccttatggaaaagaaggcgatatgttagagctcggtggacttcttgggtctgctccggtaatgaaggtcaacaaagcttcgtcagctgatttcattgcccgtggtggtcagattccagctcctgttcatagctttaaaaactaagagaaatctagtataatagtagaaaatagaaaagtctgtgatgatgaaactccagacttttttcttgcaaaaggagacaagatggctaaaacaagattatttgtgattcgtcatgggagaaccatgtttaataccattggccgtgctcaaggctggtccgatacacccttgacagcagaaggagaacgagggattcaagctctaggaatcggcttgcgtgagtccggtttggagtttactcgagcttattccagtgattcaggccgtgccattcagactatggggatcattctcgatgaattgggcttgaaagaccagattccttatcgctttgacaaacggatccgcgagtggtgttttggtagctttgatggagcctacggtggggagctctttcacggtgtcgtgccgcgcgtgctagatgtagaagactataagaccttgaccttggaagacttggccaatggcatctgccaagtagatacagcaaattgggctgaaccatgggaagtcttgaaaaaccgaatcctagaaggttttgaagccatcgccaaagaagtagaagaaaatggtggaggcaatgccttggtggtcagccatagttggaccattcagaccttagtctgcttggtcgaaggaaaaccaaatctcaatctgcctctttcaaatggtagtgttacccttgtagaatatgaagatggagtattgacggttaaggggttcggagatagcagttaccgtgaggtcggtgaaagtttgcaagaatcctagtccgtcctgaaaggctgaccctttggtcatggccttttctttttctcacaacttgtaagagctttcctactttctttttgcaaaaaatgatataatgaaagagatacatacggaggtaatacaatgacaaaaaccagattatatattgctcgtcatggaaaaaccatgtttaataccattggacgggcacagggctggtcagacactccgctgacagaagcaggagagcgtggaattcgagaattaggacttggtctcaaggaagctgggctttcttttgaagaggctgtttcgagtgattctggacgcaccattcaaactatgggaattattcttcaagaacttggtctgacaggaaaaatcccttatcgttatgacaaacggatccgtgaatggtgttttggtagcttcgacggtgcctatgatggcgatctcttcatgggagttttaccccgtgtctttaaggtcgatgatttccatcagttgagcctgatggagttagcagaagggatcgtcgaagtggataccactggatgggctgaatcctggggtaccttgagtggccggatcctagaaggatttgaggccattgcaaaagaggtagaagcagctggtggtggtaatgctattgtggtcagccatggtatgaccattacgaccttgatttatctcatcgatccaaaagcggtcgaagaattggtcttggacaacggaagcgtgacggttttggcttatgaagatggtgctttcagtattgaaaagattggggatatgtcctatcgtaaggttggagcaaaacttctagagggtggccatgacgaataagtatagacgcgcaagaaaaaaacgtaagaaatggtggccttacctattgagtttctttcttcttgtggtccttggatcaggaattggtgtttacttagcgaaaccaagcttgttttcaggacttcagttttggaaggctaaaaaaacagctgtaacgactccctcttcttctaagaaaaagaaagaaaaatcagatttaccagccgtttcgacaaaagactggcagttgatcttggtcaatcgtgacaatgtgaagcctgagctgaacccacaattgacagatgtggatgctatcaaagtggatagtcggattgtagaaccaactcgtcaatttttagaagcggctcgaaaaattgccccagaagaaaccttgatatcaggttatcgaagtgtggccgagcaaacagagctctataatgagcgtgttgcgcaactagaggctagcggcctttcgcacgaagaagctgaaaagcaggtgcagacccaggtacaggtccctggtgcgagtgaacaccagacaggacttgccattgatatgagtgtcgaagctggccaaagtgatgagttgggcatgcagctggctgccatcgcaccgcaatatggctttgtgcttcgctacccagatgggaagagcaacatcacgggtgtgaattttgagaattggcatttccgttatgttggcgtagaaaatgctcagtatatggccaagcatcagctagtattggaagaatatattcaactattgaaaaaggctggaaaataggaggagattcactttttctaggtcttcagaatgatttttagcactcttgaaaaaagagtgctaattttttggatttttttcttgactttcttttggatgggtgtataatagaatcatggtttagcacttgagcgtttagagtgctaaatacgaaagagaggtgaggtcatggttacagaacgtcaaaatgagattctaaatcttgtcgtcgatatctttaccaagacccacgaaccagtcggttcaaaagcactgcaagatgtcattcaatccagtagtgcgactatccgaaacgacatggctgccctcgaaaaacaaggcttactagaaaaggctcacacttcgagtggccgaatgcctagccgggctggttttcaatattttgttcagaactcgcttgatctagagttgattgatgaacaagatgtctaccaggtggtgaaagcctttgatttcgaagcctttaagttagacgatatcttggatgctacggccaagttactagcccagatgacgggttacaccgcagtgattcaggatgttgaaccgacacgtcagcgcttgactggttttgagattgttccattatccaaccacgatgccttagcggttctgaccttggatgaatcaaagcctgtcactgtccagtttgccattccaaagaatttcttaaccagtgacttggaaatcttccatcagctagttcaagaacgtttcattggaaatacagtcttggatattcactaccgtttgcggacagagattccacagattgtacagcgctatttcaagacgacaaacaatgtcttggatctctttgattacgtcttctcgcaactgtttcaagaactggtctttgtagaaggaaaggtttcatccttaacctacgccgatcttcagacctatcagtttttggataatccccaacacgtagccttggagttacgagggggaatgccagaagatcaaatgacccagatcctggttgcggagtctcaagagaaggccttgaaaaatgtgacggtcattagccacaagttcctggtgccttatcgtgggatggccctcatgcatgtgatcggtcccgtagagatggattacaggcgtgtgattagcctggtcaatgtcatcggacgggtactggttatgaagttgacggactactaccgttacctcaacagcaaccattatgaagtaaattaagatcaaatgaaaggggtgtatgccttgacagaagatatcaaaaaagaagacgtgaaagaagaggaagttgcccaaacaactgaagaagttgtagaggaaagcaaccaaccttctgagttagaagaagcacaagcgcgtgctgaggaatttgaaaacaaataccttcgtgctcatgcagaaatgcaaaacattcagcgccgtgctaatgaagaacgtcaacaattacaaaaataccgtagccaagatttggcaaaagcgatcttaccatcactggacaacctcgaacgtgcccttgccgtcgaaggattgacagatgatgtgaagaagggcttggaaatggtccaagaaagtttggtacatgctctgaaagaagaaggaatcgaagaaattccagcggacggagaatttgaccataactaccacatggccatccaaactttgcctgcagatgatgaacatccagcagacaccatcgcacaagtcttccaaaaaggttacaaactccatgaccgcatcttaagaccggctatggtagtagtctacaactaggctaccttgtccgaaacgacactaaactatgaaagaaagataagacgcaagccggaggcttgcaaggaagatatttcccgccgtggtgaaagtttcagtagcttgtgctactgaaacaggggatttttgagacagtaggctcaaaaataagtgatgaaatcccgaagggagttgctcacgtccccaccacttaagggaaatatcaaaaaaggaagaaaaacttaaggagaaaaacatatgtctaaaattatcggtattgacttaggtacaacaaactcagcagtagcagttcttgaaggaactgaatcaaaaattatcgcaaacccagaaggaaaccgcacaactccatctgttgtgtcattcaaaaacggtgaaatcatcgttggtgacgctgcaaaacgtcaagcagtcacaaacccagataccatcatctctatcaaatctaagatgggtacttctgaaaaagtttctgcaaacggtaaagaatacacaccacaagaaatctcagctatgatccttcaatacttgaaaggctatgctgaagattaccttggtgaaaaagtaactaaggctgttatcacagtgcctgcttacttcaacgatgcacaacgtcaagcaacaaaagatgctggtaaaatcgctggtcttgaagtagaacgtatcgtcaacgaaccaacagcagcagcccttgcttatggtttggataagactgataaagaagaaaaaatcttggtattcgaccttggtggtggtacattcgacgtatctatccttgaattgggtgatggtgtctttgacgtattggcaactgcaggggataataaactcggtggtgacgactttgaccaaaaaatcatcgactacatggttgaagaattcaagaaagaaaatggtatcgacttgtcaacagacaagatggcgcttcaacgtttgaaagatgcagctgaaaaagcgaagaaagacctttctggtgttacttcaacacaaatcagcttgccattcatcactgcaggcgctgctggacctcttcacttggaaatgaccttgactcgtgcgaaattcgatgatttaactcgtgaccttgtagaacgtacgaaaactccagttcgccaagccctttcagatgcaggtttgagcttgtcagatatcgacgaagtcatccttgtcggtggttcaactcgtatccctgccgttgtagaagctgttaaagctgaaactggtaaagaaccaaacaaatcagtgaaccctgacgaagtagtggctatgggtgctgcgatccaaggtggtgtgatcactggtgacgtgaaagacgttgtccttcttgacgtaactccattgtcacttggtatcgaaacaatgggtggagtcttcacaaaattgatcgaccgcaacactacaattccaacttctaaatcacaagtcttctcaactgcagcagataaccaaccagctgttgatatccacgttcttcaaggggaacgcccaatggcagcagataacaagactcttggacgtttccaattgactgatatcccagctgcacctcgtggtatcccacaaatcgaagttacatttgacatcgacaagaacggtatcgtatctgttaaggccaaagatcttggaactcaaaaagaacaaacgattgttatccaatctaactcaggtttgacagacgaagaaatcgaccgcatgatgaaagatgcagaagcaaacgctgaagcagataagaaacgtaaagaagaagtagaccttcgtaacgaagtagaccaagctatctttgcgactgaaaagacaatcaaagaaactgaaggtaaaggcttcgatgcagaacgtgatgctgcacaagctgcccttgatgatcttaagaaagctcaagaagacaacaacttggacgaaatgaaagcaaaacttgaagcattgaacgaaaaagctcaagctcttgccgttaaactctacgaacaagctgcagcagcgcaacaagcccaagcaggagcagaaggcgcacaagcgacaggcaacgcaggcgatgatgtcgtagacggagagtttacggaaaaataagatgcaaagcccgttaaaacctcacagtgaaaataggaaatctgacgcagaaactctagtttctaggaagatttatctttttcaccaagaggttagggcgtgctcaattcagcttaacaactaaatgataaaaagaaatccagaggttgcaacccagcctctgtttttcggtaaaatagaggatgttgtctatgaaaaaagtactttgtatcatttatccaaatttttctctttatgagataactgctttaacgagtactttagttctgtcttttggcgtcacgattgattatgtcgcttcagatcattcgatggtggtctctgaggatggattgccttgtcaaccaacgaaaacactagatcaaatccgtatagaagagtattcttgtgtgattttgccaggaatggtcaatataggtcctgctctacagaatgagaaattgatttcgttcttgagggctcttggtgagcaagatatcctcattgcagccatttcttcagcgcctcttttattagcgaaagcaggtttgctgaacgatacgaaatttacaggtggaatttggcaaaacttctttgattattttgaatttcttccacgtgagaatttccaaccgaaagtggttgtgcaagataaacagatcattacggctatcggttttgcccatcaagagtttgcaagaaaagtgattctaagtttaggcttggcagagaatacggacaactattttaaagaacgaaacgactattcagaagaggatttgatatttactctatcggaccaagagtttgatcaagtgaagcgaagtatagaaaacagcctctaaagatttacatgaaaattatagaaaggaacaaagagtgttcgtaactgaacacgggctacggacggtgccaaaaagatagttttttctaggacgcaagcgtccgtcgtcaaaactcctattttggctgtgtccgtttaacgccctttgtatcttgaattatgaacaatactgaattttatgaccgtttgggcgtttcaaagaatgcatctcaagatgagatcaagaaagcctatcggaaattatctaaaaaatatcacccagatatcaacaaggagcctggtgctgaggacaagtacaaggaagttcaagaagcttatgagactttgagcgacgagcaaaaacgggctgcttatgaccaatatggtgctgcgggtgccaatggtggcttcggtggcggagcaggtggttttggtggctttgatggtgctggttttggtggctttgaagacatcttctctagtttctttggtggtggtgcgagtcgtaatccaaatgcacctcgtcaaggagatgacctccaataccgcgtcaatctcaagtttgaagaagcgatttttggtgcggaaaaagaagtcaagtaccatcgggaagctagctgtcatacctgtcatggttctggggctaagccagggactagtccggtgacctgtggacgctgtcatggttctggagtcatcaatgtggatacgcaaacccctcttgggatgatgcgccgtcaagtgacctgtgatgtctgtcatggtcgtggtcaagaaatcaaagatccatgtacgacttgtcgtggaacaggtcatgaaaaacaagctcatagcgtaaacgtcaagattcctgcaggagttgaaacgggtcaacaaatccgcttagctggtcaaggagaagctggttttaacggtgggccttatggtgacttgtatgtcgttgtcaatgttgagccgagcgatcgcttcgaacgagatggctcaaccatctactacaagttagacttgaactttgtccaagcagctcttggagatacggtccatgtgccaaccgttcacggagatgtcgatttgatcattcctgaaggaacccaaactggtaagaaattccgtctccgtggaaaaggggctccaagcttacgtggtggtgccatgggagatcaatatgtatctgtcaatgtcgtcaccccaactggtttaaatgacaagcaaaaagaagcccttcaagcctttgcggaagcgagcgatttgaaggtcaacccaaagaaaaaagggttctttgacaaggtcaaagatgctttagatgatttataagaatgaacgagtttccttttgagtaaggagctcgttttattttggatcgaatccaagaacttcctctcctaattaaagaataatgagaagcttcattgaatttattaagatatcgtggtaaatttaagaaaacgattacaaagacaatttaggaggtcctgatgaaatcacatcaaccacgttatgcgattcgcaagtatgcagtaggagctgcttcggtgctcataggattttttgctggtgctcagggtgtagcggcagatacgccgagcgttacagacagtccttcaacgacagttccaactaagccaagccaaggtgagtcaacgatttctcttaatgaggaagcttctcagccaacagtagaaaaaccaacggctccagccccaatcgtcgatcaaagtcaaccgacactgcctgatcgtgaattgcgggtatcagatattgaccgtttgattcgcgaagaagcgagctctgtcgcagagtcggatgtggcagctcaaccagcgacagcagcgacggaaacgcctgctaaagatcctgaccaagaagaaaaattagccaagaaaaagattgtttcgatcgatgctggtcgcaagtacttctcaccggatcaaatcaaggaaatcattgatgaagctagtaagacgggctatacagacttgcatcttctagttggaaatgacggcttgcgctttgtgctggatgatatgtctttgaaagtgggagatacttcttattctagccaagccgtgacagatgcggttgaaaaagggacaaaagcttattacgatgatccgaacgggacagctttgacccaggctcaaatggatgatattttggcctacgccaaatcgaagaaagtaggtgtcatcccaaccattaatagtccaggtcacatggatgcgattctgacggccatggaacaattgggcatcgaaaaccctcactttaattattttggtacaaagaaatcagctcggacagttgatttggacaaccaaaaagccttagactttaccaaggctttggtagacaagtatgcggcttatttcagcggcaaggcagatattttcaatattggtttggatgaatatgccaacgatgccacagatgcccatggttggcaggttctccaagctagcaagcattggccaggtgaaggctatccagaaaaaggctatgaaaaattcatccaatatgctaatgatctagcagctattgtgaaaaaacacaagatgaaaccaatggccttcaatgatggaatctactacaatggcgatacttcctatggcacttttgacaaggatatcattgtctcctactggacaggtggctggaacggctatgatgtcgcatcttcaaaactcttgtctgaactaggtcatcagattcttaataccaatgatgcttggtattatgtgcttggaagggacaaggctggatctggttggtacaatcttgatcaaggtcttgaaggaatttccaagtcagcgattgatgtggttcaaaaaaatgatggggctaagattcccttcatcggtggcatggtagctgcctgggcagatacgccatctgcaacctacaaaaaagaccttctctttaagctcatgcatgccttcgcggacaagaatgcggactactttgtagcagatcctgaagtggtcgaaaaagctctttcggaagctccaactgatttggaccactatacaccggaatctctagtagcctttacggcagctaaaaaagctttagaaggggcaggagcaaacaccactcgagcagaggccaaaaccttgatcgaccatctcaaagcagctcaagatgctttggtgtatacggaaagctacgcgaaagaagttgctgcaaaagaagcggaagaaaaacttgccatgaagaaggtcatctcgatcgatgcaggccgcaaatacttctcactggatcagttgaaacggatcgtcgacaaggccagtgagctgggttattctgacttgcacctccttgtcggaaacgatggtatgcgcttcgtgctcgatgatatgacggtggaagccaatggaaaaacctatgctagtgatgatgtgaaaaaggccattttagaaggcaccaaggcctattacgatgatccaaatggtcaagccttgacccaagcggaaatggatgaactccatgcttatgcgactgcgaaaggaatcggcttgattgcggcagtcaatagtcctggacacatggatgctttgttggtggccatggaaaaattgggcattgaaaatccacaagccagctttgatacggtttcaaaaacaaccatggatttgaccaatgaagcagcagtcaactttaccaaagccttgattggcaagtacatggactacttcaaagacaagtctaagatctttaactacggaacagatgaatatgcaaatgacgctaccagtgcgcaaggctggtactacctcaagtggtatgacctctatggtaaatttgcggagtattccaatagtcttgcagccatggcgcgtgaaaaaggcttgcagccaatggcctttaacgatggcttctattatggagatgaggatgatgttgcctttgacaaggacgtcttgatttcatactggtctaaaggatggtggggctataacctcgcttctccacagtatttggcagataagggttataaattacttaataccaacggagactggtactatgttttgggccacaaaggtgatcaaagttatccgctcgaaaaagctattaagaatacagaaactgttccgtttgaacagttagcttcaaccaagtaccctgatgtcaaattaccgacatccggaagtatgttgggaatttgggctgatgagccggccaatgaatacaaggaagaagaagtcttccaggtcatggaagcttttgccaaccacaacaaggactatttcaaggcagacttcactgctcttagaaaagcagttgctacggtgccaacagatctagacatttacacaccagaatctcgcgcagcacttgcgaaagtcttagatagcttgaattggaatgtgagccgtgctcatcaagatcaggtggatcaagaagtggctgctctgaccaaagcccttgtggggctcaagccaatcacgcaagtaggtagcttggctgaaaatgacgtcaaagccctagtggaagacaaaccaagtcttgaaatcgtggagaaagaacttgattttgaccttgtggaacggaccaatccagatctcgctaaaggagaacgcagagtgatccaggctggggttaaagggcaaggtcttgactatgtagaggtttcggcgcttgatcaaagtcgaaaagtgatcgctacagaagttgcaacagagccagtgacagaaattgttgaagccggtaccaaagaagtcgtgatcccaacaagcccttccgtagaagcaccagtgaaaccagacgtgctcgtaaacaaagtggttccagatcattcaacacctcaagtgatctcgaaagatcaaccagtagcaccagtaaataccccaacgccaattccagcagctgtggaaaaagaggttcgttcagaaacagtatcttctaacaagcaacttccagaaacaggagcagaatctgctttgggactcgctttactaggagcgatcttaggagcagcaggaatggacttgaaaaataaaaaaagagactaagacctagtagatttgtaacaggtcgaagttaggagagtgggacagaaatcggtaattcgttagaattcgatttcgtcgtcccacctccgcacagttgagtagggctgtaaaagctgatgaaatcagcgtagtagagcccactcgaccactgcgtcttgctcgacaatccaaaaataattgagaggctaggacttttgtcccagcctctttttgtgtttgcaaaactgtacccggacagtttgactttttcactattgtaaccccttctatatcttgctaaaatagaaccatgacacgatacaaagcaaccatttcatatgatgggaccttgtttgcagggtttcaacgccaaccgcatgcccgcagtgtgcaagaggaaatcgagaagaccttgacgcgcctcaatcaaggaacccccgttaccgttcatggagcggggcgaacggattccggtgtccatgctcttgggcaggtgattcattttgatctcccccaagagcgggatgaggagaagctccgctttgccctcgatacccaaaccccagaggatattgatttcatccgtgtggagcaagtagcagatgactttcattcacgctacaagaagcacagcaaaacctatgaatttatcgtggattatggtcgtcccaagaaccccatgatgcgccattatgccacccactatccttatcctttggatgtggaaaagatgcaagcagccatccaaaagttggagggaacccatgatttcaccggtttcacagcttcaggaaccagtgtggaaaacaaggttcgtacgattacagaggctcgcttggttgaggatgcagaacatcatcgccttgtctttaccttttcgggcaatggctttctctacaagcaaatccgcaatatggtgggaactttgttgaagatcggaaatgatcggatgccgatcgagcagatcgatctaattttagaaaagaaggaccgcaatctagcaggtcctacagcagcgccaaatggcttatatttaaaggagatccgttatgagtaatgaattgattctagctatttcaggaaatgatatttttagtggaggaggtcttcatgcagaccttgcaacttatacgactaataaacagcatggctttgtagcggtgacttgtttgacggctatgacggagcacggtttcgaagtgattccggtggatccgacgacctttgctcaacagctcaactctctcaaggatgttcctttctctgctattaaactcggcctcttgccaaatgttgaagtggcagacttagccttggactatgtcaaagcccatgcggagatccctgtggtactagatcctgttttggtctgcaaggaaagccatgatgtggaagtttcagttcttcgagacgaattgatcaagttcttcccttatgtgacgatcattacgccaaacttaccagaagctgagatcttgacccaaagcaagattcaatcgctcgacgatatgaaggaggcagcacgcaagctccacgaattaggagcagcgaatgtcgtggtcaaagggggaaatcgtctcaataaagaaaaggccatcgatgtcttttatgatgggacagacttcaccgtcattgaagagccagtcttagaaaagaacaatacaggagctggttgcacctttgcgtctagcatttccagccagttggtgcaagggaaatctccacttgaagctgttaaagcctctaaagactttgttttccaagcgattcaacattcagaccagtatggagtagtacagtatgacatctaatcgaactcaactcattgcccgcctttccattttgacagccttgacagttgtgcttggctactatacaaaacttccaactcccacagggatcgtcaccctgctagatcttggagtttatttcacagccttctattttgggcgtaaggaaggtgcgattgtaggtggtgtcggagccttcctactcgatctgatttcaggctatcctcagtggatgttctttagcctcctctttcacggaggccaaggttacttcgctggcttcaagggcaaagctcgttacctaggcttgctccttgcaacagtcgtcatggtaggcggttacgcactagcttctgctctctttttaggcaatggctggagtgctgctatctcggacattccgaataacctcgctcagaattttgttggaatggctttaggctatgtggtctattatgcatttccaaagaaaggaagctaattcatggatctggagcaactgaagaaggatacgaaagaaatcctggtagatgtcttgggaaaaagccgtctccgccaaggacagattctagtcctcgggatgtcttcaagcgaaattgcaggagggcaaattggaaaggcctccaacatcgatattgctgaagctattgtccagaccttgctagatgagttgaatccaagagggatttatctagcggtacaaggatgtgagcatctcaatcgctccttggtggtcgaaagagaattggcagataaaaaggagttagaaatcgtcaatgtccttccgagtctccatgcaggaggtgttggacaactcgcagctttcaagtattttaaggatcctgttgaagtggaatttatcacagctcaagccgggttagacatcggagatacctcagtagggatgcatgtcaaacacgtgcaagttccgattcgccctatcttgcgtgaactaggtggcgcccatgtcacagccctcgccagtcggccaaaattgatcggtggcgcccgtgctctctacctcgatgatcccatccgaaaatcataattagaactagtttttaagggctagtttttttggatgaaaagagaggcaaaaacgttttaaaacttgcaatttcaaagttttgtggtaaaattataaggaatgactatattattttaaggagagacagaatgtctgtatcatttgaaaacaaagaaactaaccacggtgtattgactttcacaatcagccaagagcaaatcaaacctgctttggaccgtgtgtttgagtctgttaagaaaactttgaacgtacctggattccgtaaaggtcatattccacgcccaatcttcaaccaacgttttggtgaagaagctctttaccaagatgctttgaacgatcttcttccagcagcatacgaagcagctgttaaagaagctggaatcgaagttgtagcacaaccaactttcgatgttgtatctatggaaaaaggtcaagactggacattgacagcagctgttgtaacaaaacctgaagtaaaattgggtgcttacaaagaccttgaagtgtcagtagaagtttctaaagaagtaacagacgctgatgtggatgctcgtatcgaacgcgaacgcaacaacttggctgaattggttgttaaagaaggtgctgctgcagaaggtgacacagttgtgatcgacttcgtaggttctatcgacggtgttgaattcgacggtggtaaaggtgacaacttctcacttggacttggttcaggtcaattcatcccaggtttcgaagaccaattggttggacactctgctggtgaaacagttgacgtgatcgtaacattcccagaagactaccaagcagctgaccttgcaggtaaagaagcgaaattcgtgacaacgatccacgaagtaaaagcaaaagaagtaccagctcttgacgatgaattggcaaaagacatcgacgaagaagttgaaactcttgctgaattgaaagaaaaataccgcaaagaattggcagaagctaaagaagaagcatacaacgatgcagtagaagcagcagcaatcgatcttgccgttgaaaatgctgaaatcgttgaacttccagaagaaatgatccacgaagaagtacaccgttcaatcaacgagttccttggaaacatgcaacgtcaaggtatctcacctgaaatgtacttccaaatcactggaacaactcaagaagatcttcacaaacaatacgaagcagaagctgaaagccgtacgaagacaaaccttgtggttgaagcagtagcgaaagcagaaggcttcgaagcaactgaagaagaaatcaacgctgaaatcgaacaattggcagcagattacaacatgccagttgaacaagttcgcaaccttctttcaccagaaatgttgaaacatgacatcacagtgaagaaagcagtgaacgtgattacaagcacagcaaaagtaaaataattgagattaaaaaggctggacaacaactgttcagcctttgatgtttgatagaaataactgtatgacgcagtggttgattggcatctttgttcgcctttaagctccaaagatgacctaatcaactgtgcgggggtgggaaaacgaactctttttaactagtcggagttctttcccactcccttttctgatttcatggagaatcctggaattttcctttgacgaaaggggaaatttatcgtacaatagagtgtaacgataaaatgcgtgatagatttagtgacgagaagttttcaatctatcatcgaggataggatgaggtttaagaccggatccttctccatttaggaaatgaaacataaggagatttacccttggaattagaagtatttgctggacaagaaaaaagtgaactttctatgattgaagtggcgcgtgcgattttggaattacgcggacgtgaccatgaaatgtactttagcgatcttgtaaatgaaattcaaaattaccttgaaaaatcaaacagcgagatccgtgaagccctcccattgttctacacagaattgaatgtagatggaagctttatcccacttggagataacaaatggggtcttcgttcatggtatgccatcgatgaagttgacgaagaaatcatcgctcttgaagaaacagacgaagatgaagctcctaagaaacggaagaaaaaacgtgtcaatgccttcatggatggagacgaggatgcgatcgactacaacgacgacgatccagaagacgaagaagtttacgaagcagatccagctctttcatatgatgaagaaaatccagacgatgaaaagagtgaagtcgaagcttacgatgctgaaatcaatgaaatcgtaccagatgatttgggtgaggaagttgaattaagcgaagaagacgacgaagaagaggattctgaagacgaggaagaagaataaatcatatgaaacaaggaaattgttccttgtttttttattgaagacgaagttttcccagaaactttccttaggtgagtacggacgtcagcgaacttctacgaagttccatgactaattattgagccttaagtctcaataattccgagtgcctgaagctatgaagtttcaggcacttttctcacggcggaaagtttcagaatatcctttgatttttcaaaagtagaggatggtttgcaagtaatttattgacttatatgtcaataaaaatagtttatctatcttctgaaaaaaaacaattgttccttgtttctttttgtttgcattgaaaacggtggcaagttagagtataatgaacatgtaagtatttcccaaataggaggtgttcagatggactttcgtttagatcaaagtttagtagctcttggtattgatacggttgtggtcggaattgctagaaatgtggatctccaagcagtcttgcccccttcttttcttgaaaagaagaaagcagttgaacaatgggcgctccagtgtcagacagaagaagtagcggcatcccctgtcgtcaaaggctatacagacctcttgcaaaaagtagggcgtagcatcaagaaaaatccaccaacagtccttgctctcatccgaaacatccagcaccgtggttctctgcctcagatcaatagcatcattgatatttataatgttgaatgtatgaagtcttttctcgcgatcggaggacatgacctagataagattgagggaccgattgaatttacagtgagtcaaagagaagatctcttcttccccatcctttctagcgaaaagcatgtcgcaccgacagatcccgtctatcgggatcaaaaaggagttctggcttggttggatgtacgcgatagtgaccattataaatttgaggagactacgcaaaacgctctctttgtcattcaaggaaataccgagacatcagtcgagatgcgtttagaagcactggagcgaatccataaggaccttgcttcttgcatgcctcggcttcaatttgagaaatttctcgtcacacaaaatggagtggaaaaagtctcataaacagtgaaaaccattttcatgaaattttcaatttgacaaagtagaccatttgcggtaagatattgttcgggcacctcattttgaggtcggagctccctagcgattagggggctatttttgttttttctgcaaagaggaatggcctctacaacattagaagaagaggaaagcacatgtcaacaaaatatatttttgtcacgggtggtgtcgtatcatccatcgggaaagggattgtcgcagcaagtcttggtcgcttgcttaaaaatcgtggattgaaagtaactatccaaaaatttgacccttatatcaatatcgaccccgggacgatgagtccttaccaacacggggaagtatttgtcacagacgatggtgcagagacagacttggaccttggtcactatgaacgctttattgatatcaatctgaataagtactcaaatgtgacgacagggaaaatttatagtgaggtccttcgtaaggaacgtcgcggagaatacttgggcgcgactgtacaggttattcctcatatcacagatgctttgaaagaaaagatcaaacgagcagcgacgacgacggattcagatgtcatcatcacagaagtcggaggaacagttggagatattgagtcccttccattccttgaagctcttcgtcaaatgaaggcagatgtcggtgctgaaaatgttatgtatatccacaccacccttcttccttacttgaaagctgcgggagaaatgaaaaccaagccgacgcaacactctgtgaaagaattgcgtggtcttggaattcaaccaaatatgttggtcatccgtacagaaaaaccagctggtcaaggaattaagaacaagttggctcaattctgtgatgtggcaccagaagctgtcatcgagtcacttgatgtggaacatttgtaccaaatcccattgaacttgcaagcacaaaatatggaccaaatcgtttgtgaccatttgaaattggatgttcctgcagcagatatgacagaatggtctgcaatggtcgacaaggtcatgaacctcaagaagcaggtcaagatttccttggttggaaaatacgtagaattgcaagatgcctacatttctgtcgttgaggccttgaagcactcagggtatgccaacgatgcagaagtcaagattaattgggtcaatgccaatgatgtgacagctgaaaatgtggcagaactccttggagatgcggatgggatcattgtcccaggtggttttggtcaacggggaacagaaggaaaaattcaagccatcaagtatgcgcgtgaacaggacgtcccaatgttgggtgtctgcttggggatgcagttgacttgtatcgagtttgcccgtcacgttttaggcttggaaggggctaattcatccgaattggatccagaaaccaagtatccgattatcgatatcatgcgggaccaaatcgatgtggaagacatgggaggaacgctccgtctcggtctttacccatctaaactcaaacgaggctcaaaagcagcagctgcctatgacaatcaagaagtggtacaacgtcgccaccgtcaccgttatgagtttaacaatgctttccgtgaacagttcgaagaagcaggatttgtcttctcaggcgtttcaccagacaaccgtttggtcgaaatcgttgaaatcccagaaaacaaattctttgttgcttgccaataccacccagaattgtcaagccgtccaaaccgcccagaaggactttacacagcctttatcacagcggcagttgaaaaccacgatagcaaataaaaatcaagggagcaggtcgaaggacctgctccctttttgtgaaaaaatgacaaactctgaaaaaagtttgaaaaaaatcttgacaaaaaagtcgttgattgatatactagtaaagtactcaatcgcggggatggcggaattggcagacgcgcaggactaaggatcctgtgaccgctttaggtcgtgagggttcaagtccctctctccgcatcggatcaagatagcttcggctatcttttttttgttttcaaatttctttgtggtagaataggtgtgagatgaggtgagaacatgaagaaaaagtatctggttttggtcgatggcctctttgcactattgggaagtgccattaattttttcggtcctatcctgattttagcgatggcgataggcgcatacaaggatacttttagatattttattgccttaaacatatggaatgttttcatttttctaattgcgatggcgtctcagtatctgctcagagatgaaaaaagaatcaaaaaatggattcttcatctctttctgatagcgggctttattctctttcttgcgtcaatccctgctgtgggtgagaatattcccgttcttgagggagtgctaaacggacttcttggaaaaatatttaccgacagtcagttatttgctgcttatttctattctcaatgggttgcagcggtatcctttgtgatttgcgggattgcttttctcctttcgttaaaaaattttaaagagaaagattgaaaggggttaagctccttttttgctttttgaataggatggaagtcttaggagggagagggttcctcctcatttatcgtaagaaatcgcttaaagccacaggaaaaactagcaatttcatctaaaaagtgataaaataaacaatgtaagtgggattaaccccacaaaaatttataggaggcctataacaaatggcaatcgtttcagcagaaaaatttgtccaagcagctcgtgacaatggttatgcagttggtggatttaacacaaacaaccttgagtggactcaagctatcttgcgtgcagcagaagctaagaaagctccagtacttatccaaacttctatgggtgctgctaaatacatgggtggttacaaagtatgtaaagcccttattgaaaaccttgtagaatcaatgggtattactgtaccagttgctattcaccttgaccatggtcactacgacgatgctcttgaatgtatcgaagctggttacacttcaatcatgtttgacggttcacaccttccagttgaagaaaaccttaaattggcgaaagatgtcgttgaaaaagctcatgctaaaggtatctcagtagaagctgaagttggtactatcggtggtgaagaagacggtatcatcggtgacggtgaattggcaccaatcgaagacgctaaagcaatggttgctacaggaatcgacttcttggctgcaggtatcggtaacatccacggtccttacccagcaaactggaaaggtcttcaccttgaccacttgcaaaaattgactgaagctgttccaggattcccaatcgtattgcacggtggatcaggtatccctgatgatcaaatccaagcagctatcaaacttggtgttgcaaaagttaacgtgaacactgaatgccaaatcgcatttgcaaatgctactcgtcaattcgtacgtgaatacgatgcaaacgaagcagaatacgataagaagaaactcttcgacccacgtaaattcttgaaaccaggtttcgaagcaattacagcagctgttgaagaacgtatcgacgtattcggttcagaaggcaaagcttaattgaaaacaggaaagcaaggtcccatgtggatcttgtttttttgtatgggaaaagttgcttccgggatttaatttttgtacaatatgcctatgaaaaaatttaaacagttttgctggatcatttttgtttttcttatcctttttctaggaggcacatttggttttcaccaacttagtttgcaaaaagaaagtaagcttctgactcctatcggtaaagaggtgacggtcaatggacatcgaatgaatgtctctgttaaaggagaaggatctgaaacaatcgtttttctttccggtgcaggtatcgcctctcctattttagactttaagaatctatcagattccctatccaaaaaatacaaagttgttgtcgtggagcgagcaggatatggttttagtgaagatagtgatcgttcaagagatgtgatggaggtcctttctgagacccgtcaagctttggcgcaagctcatgtttcaggtccttatgtgattatttcgcattctatggctagtttagagagtcttgcttggcaagagaaatatccaaatgaagtgaaggctttgattggtctggattgggccttgccagcgagttatgaagatttaaaagaacacccaactctcataaccttagcctattggacgagtaagattggcctgctccgttatttcccagagtctgtttacctgaagaattctgacttgactaaaagtgagcgtcagcaataccgatttttagcttacaagcagttgctgtcgacggctatgctcaatgagacccgaactgtaaagaaaaatgcccaaaaggttagtaaatttaccattgatcccaaaatccctgtacttctcttggtttcaaatggggagggaaccagctttagccaatcagagtggcaacgttatgcagagagatttgcaagcgaccagtctaatgttcaagtcgactatatggatgcgcctcacgacctctatcattatcaaagcgatgctattgtttctcgtattaaagaatttttagagaataattgagggcttaaaaatccattgagactgatgataataattaaatgctgaaggattaacagtagaatcgttaattttctcgattaaaaaaatcctttttcttaacaataagcctgcccctaagggcaggttttttggtgtcttaaggaaactatttaacagaatttttgattaaaagtttcattttaagagagaaatctctaatttcataatctataagcaaacgcttgcattcctttttttattagattataataggttggtataaagccttctgtaataatattgagtaagtgtagaaagtaaggatttagaatatttgtagtcaaaaatacaatgttgcttcttacgatagggagatagatatggcaatgatagaagtgcaacatcttcggaaaaattttgtgaagacagttaaggagccggggttaaagggagccttgcgctcctttattcatcctgaaaagcagacctttgaagcggtcaaggatttaacttttgaagttccaaaagggcagattttaggatttatcggggcaaatggtgctgggaagtcaaccaccatcaaaatgctgacaggaattttgaagcccacatctggcttttgtcggattaacggcaagattccgcaggataatcgccaagattatgtcaaggatattggagtcgttttcggacaacgcacccagttatggtgggatttggctctgcaagagacctacacggttttgaaagagatctatgatgtaccggactcgcttttccataagcgcatggactttttgaatgaagttttggatttgaaggaatttatcaaggatcctgtgcggactctttcactaggtcaacggatgcgggcggatattgcggcttccttgcttcacaatcccaaagttctctttttagatgaaccgactattggtttggatgtgtcggtcaaggacaacattcgtcgggccattacccagattaatcaggaggaagagacaactattctcttgactactcatgatttgagtgatattgagcaactctgtgatcggatttttatgattgataaggggcaagagatttttgatggaacggttagccagctcaaggagacatttggaaagatgaagactctctcctttgacctgacgccaggtcaaaatcatctagtctctcattatgagggtttgcctgatatgtccattgatagacaaggaaatactctcaatattgaattcgatagttcccgctaccagtcggccgatattatcaagcaaaccttatctgattttgaggtccgtgatttgaagatggtagatacggatattgaagatattatccgtcgcttctatcgaaaggagctctaagatggtcaaattgtggagacgttataaaccctttatcaatgcagggattcaggagttgattagctatcgagtcaactttattctttatcggattggcgatgtcatgggtgcttttgtggctttttatctatggaaggctgtctttgattcctcccaggagcctttgattcagggcttcagtatggcggatatcaccctctacatcatcatgagttttgtgactaatcttctgactaggtcggattcttcctttatgattggtgatgaggtcaaggatggttccattatcatgcgcttgttgcgaccagtgcattttgcggcttcttacctctttacggagcttggttccaagtggttgatttttatctctgttggactgccatttttaagtgtcattgttttgatgaaaatcttatctgggcaagggattgtagaagtgctgggactaactaccctttatctttttagcttaacgctggcctatctgattaactttttctttaatatctgctttggattttcagcctttgtatttaaaaatctttggggttccaacctacttaagacttccatagtggcctttatgtctgggagtttgattcccttggctttctttccaaaggtcatttcagatattctgtccttcttacctttctcatccttaatttacactccggtcatgattattgttgggaaatacgatgctagtcagattcttcaagcacttttgcttcagcttttctggcttatagtgatggtgggcttgtctcagttgatttggaaacgagtccagtcatttatcaccattcagggaggttagtatgaaaaaatatcaacgcatgcatctgatttttatcagacagtacatcaagcaaatcatggaatacaaggtagattttgtggttggtgtgttgggagtctttctgactcaaggcctgaacctcttgtttctcaatgtcatctttcaacacattccctccctagaaggttggacttttcaagaaattgcctttatctatggattttccttaattccaaagggactagatcatctcttttttgacaatctatgggctttaggtcaacgactagttcgaaaaggggagtttgacaagtatctgactcgtcctatcaatcctctctttcacatactcgttgagacctttcagattgatgccttgggtgaacttttggtcggtggaattttactagcgacaacggcgactagcattgcttggactcttccaaaattcctgatttttctagtttgtattccttttgcgaccttgatttatacttccttgaaaattgctacagccagcatcgctttttggaccaagcagtcaggtgccatgatttacattttctatatgtttaatgattttgccaagtatcctatttctatttacaattcgctccttcgttggttaattagctttattgtacctttcgcctttacggcctactatcctgccagctatttcttgcaggacaaggatggactctttaatattggtggtttgattctgatttcccttgttttctttgttatttccctcaaactttgggacaggggattggatgcctacgaaagtgctggttcgtaagaggtaaagtaagactaaaatcaagaaaggaacttatgatgtttgtaattaaagaagtcaagggtgaagatcaaaaaatggcagttgtcgctgagattttaagggatttgccagaatggtttggaataccagaaagcacgcaagcctacattgaaggagctaaggatttacgagtttgagctgcttatcaagaaagtgatgtagtagggtttataagtttatcatattcgagtgaagattgtgctgaaattgactgtctaggcgtgaaaaaatcattccaaggtcaaggaattggaagggaattagttacgactatagaaagagaagcagtcaaacaagtggcctacctacaggtcaaaacagtcgcagaaggttcaaataaagattatgaccgaacaaatgtcttttatcgcagtcttggttttaaaaaattagagatttttccgcaactatgggatccacagaatccatgtcagattctgattaaaaagatcaactaaaagtgcttgacatccgctatcagagtgctatactaagaaggtaatcgccgatttagctcagttggtagagcaacgcactcgtaacgcgtaggtcacaggttcgatccctgcaatcggcataggaagaaacgactttgaaggagcgagacgacgaatgatgttcatcacatattcgttcggtctcgtttctttttttgaccgcataggcaccatttttgaccgcttagtcaaaagtccttgtctccgtaggagctctctgctatcatagaatcatcaaaggaagaaatacttccgaataatcaaaatgaggtatatgatgaaaaaattacttggacttgcattgattcttgctgctcttgcagttgtggtaatgggaatggttggctttccaaagatcgatgtgaatatctggcctttgttccctgttctcttatttgctttctttacacttgaaaatctcttgaaaaaagattacaaggcaagtgttatctgcgccttgatcgcctttatgatcgcaaatgcgatttacgatgtcctgccggtttcaaatggtctggtcatcacagcaggtgtgctcgcttgcctgggtcttagttttcttttaccggacaaggaaagcaataaataaagaaaggaggctgggataaaaatcctagcctctcaattgtctttggattgtagagcaagacgcagtggttgagtgggctctactacgctgatttcatcagcttatacagccctactcaactgtgcggaggtgggacgacggaatcgaattctaacgaattaccgatttctgtcccactctcttttttacttctcaaatacgacctcttgatggggaaaacgtgccacttactgaaaagcccttgttttgttttcaacagctgttataatggtactatcaaaacgtttggaaaggagttttatgaaagttagaatcgaattggatccatcaatggatgagcctgagatcttgattcgagctccgcgcttgaccccggagttgacccagctgcaagagagaatcttagaacaaaaggttgctcctttagccttctacaaggatcgaagtgagtattttctagatgtggcatcgatcctcttttttgagacggacggggagaagatttttgggcacaccaaggacgaggcctatgaggtcaagcagaagctctatgagttggaggagttgcttcccatcgccttttgtcggatatccaaatccaccattgtcaacgccaagcagatctactctctggaaaagtctttttcagggaccagcacggtcaatttctatcagacccataagcaggttcacgtatccagacgctactatcaactcttaaaagaacgactaaatgaaatgaggtaatatcatgagaaaaaaattaattggagtattcttaatccttttagcagccttaatcctcttacaaggctattttgtaaaatgggacattagcatctggaccttagcttgggtcaccttgcttgcagtcctatccctctctagtttcttaaaacgccattttggttggggcttcatctatggacttttagccctcttttgtctcaatggacaataccatttccttccggtgtccaattcagttgtcatcctttcctcaattctcgctgtgattgggctcaatattttgtttaaaccctctaagaaaacaaaagcccgcctagcttcctattctgctggatccatgaataagtcggatggcaatgacatcgatgtcactttttcaacggtgacaaaatatctcaatgaccaacactttacccacggaagtgcagatgtaagtatgggagaagcatcggtttattttgataattgccggattgagggtccttctgctcagtttgttgtcgatgtttcccttgggagtctgagcctttatgtaccaagcgattggcgcgtccatgtaaatgtggataattccctctcagcgatccaacatcaggaaaatccaagtgctctgacaagcaaggatttctacattacgggcgatgtttccttaggaaatctggaaattatctatgtcggagcgaattcgttttcttaagtctgaaatgaaaaactttggccaaaagcttgccaagagagattttttttgataatatagtacggtatgtggtgctagcacatccgttatattagatctaataggaggaaacacagaaatggctaaagtatgttatttcacaggtcgtaagactgtatcaggtaacaaccgttcacacgctatgaaccaaacaaaacgtgccgtaaaaccaaaccttcaaaaagtaactgtccttatcgatggtaaacctaaaaaagtttgggcttcagctcgtgcattgaaatctggtaaagtagaacgcgtttaataaagaatatagaacctcatagaggttcttttctttttctctagagacagctgtcacagcgggagaagaatagtccctacccttttacagctgatctcttttatggtaaaatagaatataaaatacttttgaggtagaaattatgacagtaaaaatcaatacaaaggacggtcaaattgaattgactgatgaggttatcgcaactgttgtaggcggtgctgctactgagattttcggtgtggttggaatggccagcaaaaatgcgatcaaagataatttccaagccctcctagggaaagaaaacttctctaaaggtgttgttgtcaaaacaacggaagcaggaactatcgcagttgatgtttacactgttttgagctatggaacaaagattagcgaagtctcaaaaaatattcaagaacgtgtgaaatttagtttggaaaatcaacttggaatcactacggatactgtgaatgtctatattcaaaatatcaagattgtgggagaataatcgtggctaatattactacaagtttatttcaagaaatggttcaagcgggggctacgcgcttaaataaacaagcggaatatgtaaactctttgaacgtctttcctgtaccagatggagatacagggactaatatgggaatgaccatcgaaaatggggccaaagaagtatctgaccgttctgcatcaactgttggagaagcagcaggaatctttgctaaaggtctcttgatgggtgcgcgtgggaactcaggagttatcacttctcaattgttccgcggattttctcaaagtgtcaaagacaaagaagaattggatggagcagcgcttgcagcagccttccaatctggggtagaagttgcttataaagccgttatgaagccagttgaagggactattttgacggtttctcgtggagcagctatcggggccaagaaaaaagcagaatctaccaacgatgcagtagaagtcatgcgtgccgctcttgaaggagctaagactgctcttgcgaagactccagatatgttgccagtcttgaaagaagttggcgtggtagactctggtggtcaaggtttggtcttcatctatgaaggattcttgtcagccttgacaggtgaattcatcgcttctgaagagttccaagcaacacctgcaaccatgtcagaaatgatcaatgcagaacaccacaagtcagttgctggccatgtcgcaactgaagacatcacctttggttactgtacagaaatcatggtcgctttgaaacaaggtccaacctatgtcaaagacttcgattatgatgagttccgtaactatttgaacaaccttggggattccctattggtggtgaatgacgatgagattgtcaaagttcacgtccatacagaagatccaggtcttgtcatgcaagaaggtcttaagtacggaagcttggtcaaggtgaaagtcgacaacatgcgcaaccaacacgaagcgcaagttgaaaaagaagagcgtcaagcgaagccagttgaagaaaaagaatatgccatcatcgcagtcgttgctggtgacggattggctgatatctttaaagcgcaaggagttgattacatcatctctggtggtcaaaccatgaacccatcgacagaagactttgtcaaagcggttgaagagttgaatgcgcgcaacatcattatcttaccaaacaacaaaaatatcttgatggccgctcaatctgcagcagaagtgattgatcaacctgcagcagttgttgagaccaagaccatccctcaaggattgaccagtcttcttgcctttgatgaaagcaagtcgatcgaagaaaactacgaacgcatgagcgcttcattgggcgatgttgtgtctggtagtgtgacgacagcggttcgcgataccactattgatgggcttgaaatccatgaaaatgataatcttggaatggtcgatggcaaaatcgttgtttcaaacccagatatgatggaaaccttggaagaaacattcgctcatatgttggacgaagatagtgaaattgtgaccatctatgtcggtgaagatggcagtgaagagttggcaaatgaattggcccaagtccttgctgagaagtatgaggatgtagaagtggaaatccaccaaggtggccaaccagtctacccatacttgtttagtgtagaataattgaacagaaggttcctttcggaacctttttttgtatatagaaaaacgaggagattccctatgaaatcagtgtgattcaaagggattgagactgaaatgaactctccacggagactttattcgtgagaaaaaggagtttctgcaaaaagtctcatattcatcagatttttattcaaattgaagagcttgaaaagaggaggaaatggtttgagaagtggagtttttagacaagaaagacgcgatatgttatactggtatcagtatgtgaaaggagagttataaaaatgaagaaattttttgtaacccttgggctagccattttggtattgactggttgttcgcaatcccaaacaaagaaaactacaaccgctagctcatctagcagttcctctgttaaaaaagaagtaaaaaatgaagaaaaaaccacaaccttagtaggagatatcaatggaacaaaacaccgggatatcatcaaatctaagggagataaggttgaaaaccttcgcatcgaagtgacagctgatctgcccaaacaacttgggaccattgcagcagagaaatcacctgaagaacttacagcagccattcaagctttgttggaacaaaacgaagactacaagaagttaaaaactgttcctggttttagtttggagtatacaatcacgccagagaaaaaattgctctcaactagtgtgattgacatcaacctaattgacgccaagtctctagaagaaatttcttactttaaagatgccggtctcaataacttgaagaatatgaaggcagatgccttggtcaaggccttgaaattgcatggcatgaaagaagaaggtcagtaagaagaatagaaaaagtcgagtgaagtcacttggctttttttagtgacttttgtcatgtgagccagtgacaaaattatctagtggctgttattttctttcgctataatatagtcagaaagtaagaggtaaggaaaaatgaaacaatggttctataaagtgtttacgttaacagtggtgggaatggtcatctatttgatcttttcaaaggatgatagcctctattaccatttcccttgggaattatttgctgggcttggtatcatgagctgggcggttcaagaaggattgaaaatgatcaagtctgttaaaaaggaaatggagcaatgaaaaaaacgggagtgaccttggttgtttttgtcatcattctggccgtttaaggctgcttgaaaggagagtatcatgagcgtcattagagtagagaacttggacaaaagtatcagaggaaaggtgatcctagaagatctttcttttacagtcgagagaggggattgtctggccttgattgggccaaacggagctgggaaaacaagcttgatgaactgtcttctgggagatatgaaggcgacttctggaatcattgaagtagaagggaaggctcctggtcatcctcgattaaaggctagtgtgtcctatctccctcaagagaatgctatcgttcaaaagttaaccgtgcaagaactgatcaacttctttcgctctatttatcccaaccccttaacaggggaagaaattgatgatctattgcgattcagcctggaacaaaagaagcaattggctagcaagttgtctggtggtcaaaagcgcctcttatcctttgttctaaccttgattggttttccgagtcttttgtttttggacgagccaactgctggaatggatacatccactcgccaacgcttttgggaaatcgtcgggaatttaaaggaccaaggtgtgactattgtctattcttcccattacatcgaggaagtagagcatacagctgatcggattctagtcttgcatcaggggcatttgcttcgggatacgacaccactcgctatgagaagcgaagaggtagaaaaacatttcaccttgcctttgcgctaccaagctctagcagcagagatggaaggtgttagtgaagtaatcattaaacccgatgctcttcagattgtgacacgtgatgccaatcgtttgtggactcgattgcaagaagaaggatgttcgatccaagaaatcgaagtaagcaatcgaagtttattggattctatttttgaaaatacaaaggaagtaggtagagaagatgaaacgcatgaaagctctcggcgtggttgagtggcatttgaccagtcgccaagctatttattacttgttatcaattgggatgcccacggccttttatctcttcttttcagggatgtaccaggacacgccaggggcccccgctcactttatgagggattatctcctctccatgacggctttttccatgatgtctacggctctattttcttttccaacggttcttgaaaccgatcgactcaataattggcaaaaagtcttgcgccatacccccgtatctatggtagaatattatctaataaaggttgtgggtctctttgtcgattttctcctatcgattggagttgtctttaccgtgggccatgtggtgcggcatgtgaatatgtccctacaggattgggtcttagcggccttccttctcatcctaggaagtctagcttttgtagctatcggtctggtcttgaccctgcttccttctagtcaattgatgtctgttgtaggtaatctcctttacatgggactggctgtcatgggtggcctttggatgcccattagcctctttccagaatggatgcaagccatcggcaaatgccttccaacctatcaattgatggaactgattaagacctttttaaacaagggacaggtcaatgtctttgcgagtgtctatttaaccttgtttaccctggtcttgtttgcccttgttatcgtctatcgtcgtcattctgaggtttgttcatgattgaaaaactcaaacatattcaccatatgttttacgtaggcctaatctttatggtctttccctttgcttctattttcttagggcagattccctggtggcatttctttttagctctcttttttatgatgagttatctaggaatcctcattgttgaaaataggacactgacctggattttttggatttatctattggcttacataggtggaaataccttatatgttgggacaggcttttgttggttttactattatctaagcaatattttagtttatcgttttagagtacacaattttcgctctccctttctttggacggcctttttatcacaactgatccttttgggagccttgttatttaatagggagatgagagaaaatgattggctttttgtcctgatcgtctctttgtttatcgcgatcatgacctttagtatggtccggatggagatgatggaagagttgaaagctgaccatgccaagcaaaatgcccaaattaatcttttgctggcagaaaatgagcgccatcggattggccgtgatctgcatgacagtctaggacacacctttgccatgctcagtgtcaaggcggacctagctggtcaattcttagcattgggtcaggttgagaaggcgcaggagcaggtgcaagagattcaagccatcagtcaagagtccatgcaccaagtccgagagattgtcgagaacttgaagcagcgaaccctggcaagagagctagaaaccgtcaagcaaatgctcgaagtggctcaaatcaaagtggagattcaaaatgagcttgatacagccagcatctcgccgattctagaatctgctctggccatggtatctctggaattagctaccaatatgatcaaacacgctaaagcgacgcaggcccttctctcttatcgctccaccgagacaggtgtggaaatggtcgcagaagataatggcatcggctttgacaaagtctctgacgaagacctgcactcgattcgcgaacggattgccttgttgggaggagagctggagatcagtcatcaacacaatccgacccggatagaaatacggatcccctatcaagaaaggaaataagatgcgtttattagttgctgaagaccaaagtatgttgcgcgatgctctctgccagctcttgctcctgcaagaggatgtggaagatgtcttgcaggcaggcgatggacaagaggccattcgtttactcgaaacacatccagtcgatattgcgattttagatatcgaaatgcccataaaaacagggttagaagtgttggagtgggctaaacgtcaacaaccccagatcaaggtcgtcatcgttaccacctttaagcggccgggctatttcgagcgggctctcaaggctggagtcgatgcttatgtcttaaaagaacgccgcatcacagatttgatggcgactcttcatgcagtattagcagggcaaaaagaatattcgcctgaattaatggaagggatcttgacccatcccaatcctctaagccctcaagaaaaggcagttttaaaagaagtcgcaaaaggggcttctaaccaagaaattgctgatcgtttattcctctcaaacgggaccatccgcaattatatgtcagccattctgaccaagttggatgcggaaaaccggaccgaggcggcaaagatcgcccaagaaaagggttggttataaggaagaaaagtttctaggatttcctagagacttttttctgatagacgtagcatttttagaaaaactctcattcttcggatttgaatagaaaattcagaaaatttactatttttccttgaaatattttctaaaaatggtatgatagtagcatgctaatttgatatacaaagtactggaaaggagagacatggagaaaattaccttagaaactgcgaaaaccggttcagagctcgttcttgaaaccctgcgtgatttgggcattgacacgatttttggttatcctggtggagcggttttgcctttatacgatgccatctatagctttgagggtatccagcatatcttgggtcgtcatgaacaaggatgcttgcatgaggctgaaggctacgccaaatcaactggaaagctgggtgtcgcagtcgtcactagtggaccgggggctaccaatgccattacagggattgcagatgctatgagcgatagcgttcccttactagtcttcactggccaagtcaatcgtgctgggatcgggaaagacgccttccaagaagcggatatcgtgggaattaccatgcccatcaccaagtacaactatcaagtacgtgagacggcagatattccgcgaattatcaccgaagctgtccatattgcgacgaccggccgtcctggtccggtggtaattgaccttccaaaggatgtgtctgctttagagacagatttcatctatgaaccaagtgtgaagcttccaagctaccagcctaccattgaacccaatgaattgcagatcaaaaagattttgaagcaattgagtaaggctaaaaaaccagttcttcttgctggtggtggggtaagttacgctggagcggcaaaagagttgattgctctagcagagcgctatcagattccagtagtgaccagtctgttaggtcaaggaacgattgcgaccagtcatcctcttttcctagggatgggaggaatgcacggatccttcgcagctaatattgctatgacagagacagatttcatgatcagtgttggttgtcgatttgatgaccgtttaacagggaatccaaagactttcgctaaaaatgctaaggttgcccatatcgatattgatcccgcagagattgggaagatcattgctgttgacattcctgtcgttggcgatgcaaagaaggccttacagcagttgctagcagagccgacggttcataacaacacagaaaaatggatcgaaaaggtgacccaagataagaaccgggttcgttcatacgacaagaaggaacgggttgtgcagccacaagctgtgattgaacgcatcggagagttgaccaagggggacgctattgtcgtcacagacgttggacaacaccaaatgtgggcagctcaatactatccttaccaaaatgagcgacaattggtgacatctggtggtctaggaacaatgggattcggtgttcctgcagctatcggagcgaaaattgccaatccagataaagaagttgttctctttgtcggagatggtggtttccaaatgaccaaccaagaattggcgatcttaaatatttataaggttccgatcaaggtcgttatgctcaacaaccactcgcttgggatggtccgccaatggcaagaagccttctatgatggtcggacgtcagagtcagtctttgatagccttccagatttccaattgatggcgcaagcttacgggatcaagaattataaatttgataatcctgaaactcttgagaaggatttggaagtcatcacagaagatgtaccaatgttcatcgaagtagacatttcgcggaaagagcatgtcttaccgatggtaccagctggtaagagtaatcatgagatgttgggggtgaagtttaatgcgtagaatgttaacagccaaacttcaaaaccgctcaggtgttctgaatcgctttacaggagtcttgtcgagacgtcaagtcaatatcgaaagtatctctgttggagcaacagaaaaccctaatgtatcgcggattaccattattattgatgttgcttcgcatgatgaagtggagcaaatcatcaaacagctcaaccgccaggtggatgtgatccgtgtccgggatatcacggataaaccacacttggagcgcgaagttatcttggtgaaagtttctgcaccagctgagaagcgggcagaaatcttggccattattcaacctttccgtgcaaccgtagtcgacgtagctccaagctcgattactgttcaaatgacgggaaatgcagaaaagagcgaagccctcattcgtgtcattcgtccttatgggattaaaaacattgcccgcaccggtgcaaccggatttactcgagattaattctcgccttaacattgttaaccccgccttaaaaaggcaaattaaaatagaaaagagattttacttatggcagttcagatggaatacgaaaaagatgttaaagttgcagcgttaactggtaaaaaaattgctgtaatcggttatggttctcaaggacatgcacacgcacaaaatttgcgtgactcaggtcatgatgttattatcggtgttcgcccagggaaatcattcgataaagcaaaagaagatggctttgatacctatacggtggcagaagcaactaaattggctgatgtcatcatgattttggcaccagatgaaatccaacaagaattgtacgaaacagaaattgcgccaaacttggaagctggtaatgcggttggttttgcgcatggatttaatatccatttcgaattcatcaaggttccagcagatgtcgatgtctttatgtgtgctccaaaaggaccaggtcacttggtacgtcgtacttacactgaaggatttggtgtaccagcactttacgctgtctatcaagatgctactggtaatgcgaaagatatcgctatggactggtgtaaaggtgttggtgcggcacgcgttggtcttcttgaaacaacttacaaagaagaaacggaagaagatttgttcggagaacaagctgtactttgtggtggtttgactgccctcatcgaagctggttttgaagtattgactgaagccggttatgctccagaattagcatactttgaagttcttcatgaaatgaaattgattgtggacttgatctacgaaggtggcttcaagaaaatgcgtcaatcaatctctaacactgctgaatacggtgactatgtatcaggcccacgtgtaatcactgaacaagtgaaagaaaatatgaaagctgttcttgctgacattcaaaatggtaacttcgctaacgactttgttaacgactacaaagctggacgtccaaaattaactgcttaccgcgaacaagctgctaaccttgaaattgaaaaagttggtgctgaattgcgtaaagcaatgccgttcgttggtcaaaatgacgatgacgccttcaaaatctacaactaattgtctgtagaagactaagcaagttgggacaccctggcttgcttttttcatcaaatcacagcaacagaggtatgaaatgataacagcaaaagatgtggctaaggcccataaaatattaagtggagtcgttgtcaatacgccccttgaatacgaccactatttatctgaaaaatatggggcaaagatttatttgaaaaaagaaaatgcccaacgcgttcgttctttcaagattcgtggcgcctactttgcgatctctcaattatcaaaagaagagcgggaacgtggggtagtgtgtgcatctgcgggaaaccatgcgcaaggggttgcttacacatgtaatgagatgaaaattccagcgactatttttatgcccattacgacaccgcaacaaaagattggacaagtccgcttctttggtggggattatgtaacaatcaagttggtcggagatacttttgacgcttcagcgaaggcagcacaagaatttacacttgcagaaaaaaggacctttattgacccatttgataatccattcgtacaggctggtcaagggacggttgcctacgaaatccttgaggatgctcggaaagagtcgattgcctttgatgctgtccttgttcctgtcggtggaggaggcctcatttcaggtgtttctgcctacatcaaagaaacggatcctcggattgaggtcattggggtagaggccgagggagcacgatccatgaaggcggcctttgaagcaggaggccccgtcaaattaccagaaattgataagtttgcagacggaattgccgtacaaaaggtgggacaattgacctatgaagtaacccgccagcatgtggaaaccctggttggggtcgatgaaggtttgatttcagagactttgattgatctttattctaagcaagggatcgtagccgaaccagcgggagctgccagtgtggcatcccttgaaatcttgcgcgaatacatcaagggtaaaacgatctgttgtattatctcaggtgggaataatgacatcaaccgtatgcctgagatggaagaacgtgccttgatctacgatggagtaaaacactactttatcatcaatttcccacaacgtccaggtgcccttcgcgaatttgtaaatgatatcttagggccaaatgatgatatcacgcgttttgaatacattaaacgcgccagcaaggggacaggtcctgtcttgattggggttactttggctaataaacatgactatgcaggcttggtcaaccgtattgagcgttttgatccgtctttcattaatttgaacggaaatgaaactctctataatatgctagtctgaatatcatacagaaacaaacgactatttaagcaatatattttgatggaatatattgcttttttatgaagacttgtgatatgatatgcgtaaattaaaaggaggaactttttatgccaggatttattatctttgttttattcttgctactagttgcaggagtcattgtgatcagctcactatatgtggtgaaacaacaatccgttgccatcattgagcgtttcggacgttatcaaaaaattagtgatagtggcattcatatgcgagcgccttttggcatcgataaaattgccgcacgagttcaattgcgcgtcttgcagagtgagatcgtggttgaaacaaaaactcaggataacgtatttgtcaccatgaatgtggcgacgcaataccgagtgaacgaaagcaacgtaaaggatgcctactacaaactcatgcgcccagaatcacagattaaatcatacattgaagatgctcttcgttcttctgtgcctaagctgaccttggatgaattgtttgagaaaaaagatgaaatcgcccttgaagttcaaaaacaagtggcagaagaaatgtcaacttatggatatattattgttaaaaccttgatcaccaaagttgagccagatgccgaagtgaaacaatccatgaatgagatcaatgcagcgcaaagaaaacgcgtggcagctcaggaattggcagaagcagacaaaatcaagatcgttactgctgccgaagctgaggcggaaaaagaccgtttgcacggggttggtattgctgagcaacggaaggctattgtcgatggattggcagactctattaaagagttaaaaggtgcgaatgtagacttgactgaagaacaaatcatgtctattctcttaaccaaccagtacttagataccttaaataattttgcagataaagaaggaaataatacgattttcctaccagcaaacccagatggcgtcgaaaacattcgtacacaaatattatcagccttgaaagcaaagtaaactttttttcattttttaaaaaaggttcgtattttcagcgattttagttgacaaaatgtgcaaaaaaatttatattagtattggaaataataatataggagaaagatcatggctaaatcgaactttgaaaaagtagaatcagttgttggatgggtgcgtgataagaaaattacaggttatcgtatcagcaaagaaacaaatgcccgtgaaatgtctatcattgccttggctcaaggacgtgcaaaagtgaagaatatctcgtttgaaactgcacttggattgattgatttttatgacaaaaatcatcaaaaattcgaagattaatttgttgttccaattgaaaaccagagagtgtgctctctggtttttttctatgcacaaaagaagaggatgcataaaaaacagcttgcttccatactggtaagcaaactgtttcaagagattaatgcaagaagcgttgaaggaattccttggtccgttcctctttgggattgctaaagatttcttttggatctccttgctcagcgatgacacccttgtccatgaagatgacccggctagagacatcgcgggcaaattccatttcgtgggttacgacaatcatggtgagtccttcttttgcaaggtcctgcatgattttcaagacttccccaaccatttctgggtctagggcagaagtcggttcatcgaagagaatggcatcaggatccatagagagggcgcgtgcgatagcgacccgttgcttttgaccacctgaaagttgtttcggacgggcagcccaatattgagatcccataccgactttttcaaggttttctttggcaactttctctgcagtttcacgatcgcgcttgaggacggtcgtttgtgcaacgatggtattttccaagacatttaaattttcaaagagattaaagctttggaaaaccattcccaatttctcgcggtagtgggtaagatcatactcaggatcaagaacattttgtccgcgatagagaatctctccagctgtaggagtctctagaagattgatggagcgaaggaaggttgattttccgctaccagagctcccaatgatggagatcacctctcctttttcaaccgtaagggaaatatctttcaaaacctcattttgaccataagatttttttaagtgtttgatttcaagtattttttctgccattatttcacctctttgacttgcatttgattggcacctgttgtataggtatcagaatctaagcgacgttcgatgtaacgaaggatacgggtgatagtgaaagtcaggataaagtaaataaccgcaataatagtaaaggttgggaagtattggtagttttgagttgcgaccgtatttcctgtaaagtacagttcaactacagagataacattcaaaacagatgtatccttgatgttaataacaaattcattccctgttgctggcaagatattgcgaacaacctgtggaaggacgaccttgcgcatggtttgtccatgggtcattcctagagcagtcgctgcttcaaactgacctggatccactgctaagatcccaccacgaacaatctcactcatataagctccggtattgatggatacgataaagatggcggcccaggtacgatccaaggaaatgttgaaggcttgggcggaaccgtagaaaatgaccatggattgaacgatcatcggagttccacggaagatttcaatgtagacattgaggaaccacccaaaggcagtttggcatccagcaaggaatttatttttagcctttggagctgtccggaagacaccgattaacaaaccgataaccaacccagcaatggtccctgtcatggagattaagagggtcataccagttccacgtaagaactgtggtccattatctttcaaaatcttcatcatttggctgaagaaagtctgctcatcatcgctagcatcactggaagcgggttgcttcttgatcatatcatccatgagtttgacttggtcttcagatgaaatcttagctagtgtagcattgacttggtcaattcgactgtcccctttcttcatcccgatagcgatggttgcatcttcctccccaacttcaaaaccttttttgaattggatcatcttaaattttgaattagcggattcagctgtcaaggcttctggacgctcagaaacataggcatcgataacgccggattctaaagcttgacgcatttgagcaaagtctcccattgcagtttcttgttttgcacccttgagttgggagatgagagagtagaggtagaccccttgttgagaggtgacctttgcatccttaaagtcatctagactagtggcattcgcatagtttccatctttgcgaactagcatgaccggctcactagtatagtagctattagagaaggcgacttctttcttacgctcagcagtaggactcatcccagcgataatcatatcgattttaccagatgtgagggcagggattaaaccgttccaagatgtttttacaattagaggttttttacctagtccctcagcaacttttttggcgatttggacatcgtacccattggcatattgattggtaccgtcaattttaacagctccatttgcatcatcttcttgggtccagttgaaaggagcgtatgccgcttccattccgattcgtaaatagtcatctgcatgagcaacctgtgtgattcccaggcaaatgaaaagccccgttaagagcgcgaataatgtttttttcattttttctcctcttccttattttaacttctcctattgtacagtaaaataggctacatttcaaacatggtcctctttttatttaaaaaatgttataataatacaaaggagcgtgatcaaatgaaaaagtatttgtatgtttttttcgcctttctggcctgcctttttgtcagtcagaatgtccatgcatctagtccatcttatgatgtactttactacggtggaaccttgaccttggacacctgggacgacgccacctatgaggaagaactggtttattatttcaaagattcttatagagggcagtatgttagcctaggaactgcgggcaacatgccacaagggtttgcaattgagataccgccaaaggttgaggtggaaggtcgtgaacttcaaagagaacccgagattacgaatctaggtgatggctaccgagtgaaaatttataacagtggtgtagcgacagatactgtcaaaattaaagttacatggaaattaaaaaatctcctctattcacacaaggatatcttggagttgaactggaaaccgatcacagatggtgatcagaaggtggacgaggttcaatttcgtgttattcctaagtttgcaccagccaatgcccaatcggaactgtatatccatacagcctttatgggaccggatgtgactgtaaagaaagaagatggaatctattctgccactttctataacctaggcaaaggaaaggctgtggagttgtatggttactggttgaagtcagacctaactacattgtataattctggtcgaaataccggattgaccaaattggatgaatttcacaagaaccaagctaaaattgaacaggaaaaatactggacacgcatgttttggaactggatcttgccagccttcattattgcactctggcttctttctctcttgggtcgcaaacggttcaaaaaaatgatttggcctggtgtgacctatccgactgatactcgtctttatgaaattccacaggacattgcacctcttgtcatgagctcggttgtttattcagccgaattagacgaggcctccccgaccaataaagagaaggcaactccgccggtgtttacatttgaaaaaatgcttcaagctactttgctggatctgatggatcgtggagtgattgtttacgagcaacaaggaaatgaagtcgttttgacgagaaagtctcatggacatgtggatgattttgaacgctcctttatgaatatggcttttggggatcaagtttcctgtcctgttaaccgtctctttgaaaattatgaatttagtgatgatctatacaaacatgccaaaaaagcagatcaagatgcgattcgttcactaggaagtaaggctcaggctcgttttgatacggctgtcaaccaagtggccagagatgttcatcgcaaggtggaagatctccatttgccaagctactatcgccctttagaagcaaaagaagaagcgcaagctagacgaagtctcttctttggttgggctgcttggtttatcgcccttggagcagaaatctttgccatctttgggatgggttggttctctgttccttgtttgatagggatcctcatactttggtttatgccagtgcgcttcaatggtgtctttaaagcctgcctacgagatggagttgtcaatcttgcgggtgctgagcaacgctattactgggatagttttggtcggatgttgaaagagattgctcacctcaacgatgcagagttgcagtctctggtcctatggaatcgcttattggtctatgcggccttgtatggtgtagccgatcaggtcacaaaggtcatgaaacttcggaatattcatttagaaaatcaagccttaaacgccttcgtttacaccccgttctatcatgatgtgacccactcaagtcatgccatgtctacttatggatcgacagcatcgacggctagtcatttcacagtttcctctggtagtggaggaggtttctctggcggaggaggcggaggaggctttggtgccttctaagtagcactaagaatggtcttggtcgctctttcccttctagtttagaaggcctggtccagtccatagatttatgatataatagagcaaatgtaagtttaggagaaaaagatgtttctgatcgaattaatcaaggcggttctttttgggattgtcgaggggattacagaatggttaccgatctcaagtacaggtcacttgattctgttacaggattttgtgcagtttaaaaatcaagatccagcctttatggagatgttcaatgttgtgatccaattgggagcgatcctagcggttgtggtgatttatttcgataaattgtatcccttcaaacctggtaaatctccactagaagtacgtcggacctggcaattatgggcaaaagttgcggttgcaaccctcccgcttgtctttgtttttaaattggatgattggtttgaggcgcatttccacaattcgatttccgttgcgattatgttgatcacctacgggattgcctttatctatctggaaagacgggaacaggttgagccagcagtaacggaattgcataagctaccttatcgaacagctctttatatcggactcttccaagttttatcgctatttccaggaacaagccgttcaggtgctacgattgtaggtggcttgatcaatggtgttagccgcccagtggtgacagaatttaccttttatttggggatcccagccatgtttggcgctagcctcttaaaggttgggaaattcgctcttggcgggcattcactagcactggggcaactctttattctactggtagcgatgggagtggcctttgtggtcagcatgtacgccatccgcttcttgacagattatgtgaaaaatcatgatttcaccgtctttgggaaataccggatcgttcttggttccatcttgctattgtatggactcttccgtgttattttctaagagatcggttgaactcgatcaaattatttttcgaggttggagacttttgtcccgacctcttttcgatgcatcctttttttgaattctatccaattttttagtataatagtaagactagaagtatgaggttatgctatgaagatgaagcaaattagtgattcaacaattaagatcacaatccaactagaagacttagaagaacgtgggatggaaattgctgatttccttgtcccacaagaaaaaacagaagaatttttctacactattttggatgagctcgaaatgcctgaaagcttcctggatagcgggatgctgagtttccgtgtgacaccaaaaccagataaattggatgtttttgttaccaaatcaaaaattgaccaacaattggattttgaggatttgtcagatcttcctgatatggaagagttgtcgcgcatgacgccagatgaatttatcaaaaccttggaaaaaacaatctctgataagacaaaaggggatgcagaagccattcaccatttggaacaagaagagttgcgggacaatcaagaacaagatccgacatctgaagcaccagtaagtcagtatatttattacattttgcgtttttcaaatatccagcaagcagttgccttttcaaaaacggtaagctttccagtggatacctctgaattatacaaaatgggatccgattattatttaaccgtcttgatcgatacagaggatcaaccaaatcaatatccaacctggttacttgctatcattcgggagtatgcggatgattcagaagtgacacgggcagttctgcaggaacatggtcatttattaatggtgtctggtgcgattgagaatttgaagaaagttgctagcttatgatgtccttttccttgcaatttgttctggtgctgattggaacttttatgattgccttggtattgacgcccttggttcgcctattctcctttaagattgatgccgtagattatccgaatgcgcgtcggatcaataccaagcctatgccaagcgcgggtggactgtctatcgtgattgctttttcaattgcgactcttgtgtttattcctatgctgacatccaccaccgcaccaatcaaaagttacctatcctataccttgccggtcgtgggcgcaggatggattatcgcgctcacaggattgatcgatgatgtaaaagagttgtctgccaagaaaaagatgatcggcatcctgctggcagcgagtctggtctggtttttgacagattttcggctgaatgattttaagattccattcggtggtcccttacttcattttgaaccatggctatcgtatcttttgacggtgatttggattgtttctattaccaatgcggtcaatctgattgatggattagatggattggtgagtggggtctctattatttccctagtgacaatggggattgtgtcctatttctttcttccagtacccaatctctttctgaccatgacgatctttgtcttggttgcgtccatcgcaggtttctttccctttaactaccatccggccattctctatctgggagacactggtgccttgtttatcggattcatgatttctgtcttatccttgcaaggtttgaaaaatgcgacagctgttgcagtagttaccccaatgattatcctcggagtgccgattacagatacctttttagccattatccgtcggactctttctggtcaaaaattttataaaccggatcgcaatcacttgcaccaccgacttctttctctgggcttgacacatcggggaactgtacttgtgatctatggaatttcgatgatcttctccttgatttctctcttgctcaacatctcgagtcgcattgggggtgtcctacttgtgatcgggctcttgtttggagtagagctgttagcagaattgatcggggttctggggccacatcacagtcctttgttaaatcttctgcgctatatagggaattcttcctaccgggaggaagttcgtcaaaaacgaaaagaaaaaactaaataagaatagttctaatcaaaagaaaagccatttaggcttttttttgatatacttgaaaggtaaaaaaatactttgtgatgaaggaatcgatgctttgagaaccttctagacttcaaagtaaaaagaaagggaatgcaatgtcgacattagaaattaaagaccttcacgttgaaattgaaggcaaagaaattttaaaaggtgtaaacctgaccctaaaaactggtgagatcgcagccatcatgggaccaaacggaacagggaaatctactctgtcagctgccattatgggaaacccaaattatgaagtaaccaaaggggagattctctttgatggtgtcaacatcttggaattggaagtagacgaacgtgcacggatgggcttgttccttgctatgcaatacccttcagaaatcccagggattaccaatgcagaatttttacgtgcagccatgaatgctggtaaagaagaggacgagaagatctctattcgtgatttcatcaaaaaattggatgaaaagatggaactgctcaacatgaaagaagaaatggcagaacgctatttgaacgaaggcttctcaggtggtgagaaaaaacgcaatgaaatccttcaattgttgatgttggagccaacatttgcccttttggacgaaattgactctggtttggatatcgatgcacttaaggtcgtatctaaaggggttaatgcaatgcggggtgaaggttttggagcgatgatcatcacccactaccaacgtttgttgaactatattactcctgacgtcgttcatgtgatgatggaaggtcgtgtcgtgctttcaggtggaccagaattggctgcacgcttggaacgtgaaggatatgcccaactcgcagaagaactcggttacgactataaagaagaactataacctgatgacaagtgatctaatgttgtcataaaatcaaacagatagtatctttattaggagaaaaaaatgagtattgaaaatattaccctcttttcggaactgcatgctgagccaagctggctgcaagatttacgaaaaaaagcttttgacaagatcgatcagttggaattgccagccattgaacgtgtcaaattccaccgctggaatcttggagatgggacgatcacagaaagcgaggcttctgccaatgttcccgattttacagccctcgattcaaatttaaaattagtccaagttggaacccaaactgtatttgaacaggtgccacaagccttggcagaccaaggagttcttttcacagatttccattctgccctagaagaaattccgcaggtggtagaagactactttatgtcttcggttaaatacgacgatgataaactagcagcttaccacacggcttattttaatagtggggctgtcctttatattccagaaaatgtcgaaatttcagaacccatcgaaggtattttctaccaggatagtgatagtgatgtaccttttaataaacacattttgattattgcaggcaaaaacagcaagtttagctatttggaacgcctagaatcaaaaggtgaaggctcagcaacagcaactgcgaatgtgacggttgaggtgatcgcccgctcaggtgcccaagtgaaatttgcggcgattgaccgtctgggtgaaaatgtcacagcctacatcagtcgacgtgggaaactaggtcaggatgccagcattgattgggctatcggtgttatgaacgaaggtaacgtggttgcagactttgacagtgacttggttggaaacggaagtcatgcagatttgaaagtcgttgccttatcaagcggtcgtcaggttcaaggaattgacacccgcgtgaccaactttggttgcaactcgatcggaaatatcttgcaacacggggttattcttgaaaaaggaaccttgaccttcaatggaattggtcatattatcaagggggctaaaggagcagatgctcagcaagaaagccgtgtcttgatgttatcggatcaagcacgttcagatgccaacccaatcctcttgattgatgaaaatgacgtcacagcaggccatgctgcatcgatcggtcaagtggacccagaagatatgtattacctcatgagtcgtggtctggatcaacacacagcggaacgcttagtggtgcgtggtttcttgggatctgttattgttgaaatcccagttaaagaagtacgtgatgaaatgatcgccaccattgaagaaaagttatctcaacgctaaggagaaacaatgctagataaaaatacaattgctcaagattttcccattctcgatcaactagtccatgatgagcctttggtttatctagataatgcagcgacgacgcaaaaacctaaacgtgttcttgaagcagttaatcactattatttgcaagataacgccaatgtccatcgtggagtccatactttggctgaacgagcgacagcagcctatgaggcggcgcgtgagaaagtcagaaaatttatcaacgcttcatcaaccaaggaagtgctctttacaagagggacaacgactggactcaactgggtagcccgctatgcagaagaagtcctaaaggaaggggatgaagtcctgatttccatcatggaacatcactccaatatcattccttggcagcaagcctgcaagaaaacaggagcaaaactggtctatgtctatctaaaagatggcttactggatatgcaggacttaaagagcaagcttagtgagaagacaaaatttgtctctatcacccatgcttcaaatgtcttaggggtggtcaatccgatcaaggaaattgctcgattagctcatgaagttggagcgataatggtcgtagatggggctcaatcaacccctcatatggccattgatgtacaagacttagatgcggatttctttgctttttctggccataagatggctgcaccaacagggattggtgtcctctatgggaaggaagaaatcttagagcaaatgtctccgatcgagtttgggggcgagatgattgactttgtttacgagcaatctgcctcttggaaggaattaccttggaaatttgaagctggaacccctaatatggcgggtgcaattggacttggtgcagcaatcgattacttagaagagctggggatggaacaggtagaagcgcatgagcaagaattgattgcctatgtgtttccaaaattacaggcgatcgaaggcttgaccatctatggttcccaagacttagcccaacgttctggcgtcatttcctttaatctaggagatctccatccgcatgacttggcaacagcattagattatgaagggattgctgttcgtgcaggtcaccactgtgcacaaccgctccttcaatacctacaagttccggcgacaacgagagcaagtttttatatctacaacaccaaagcggactgtgataaattaattgaggcattgatcaaagcaaaggagtttttcaatggcactttctaaattagattcgctgtacatggcggtcgtagctgaccattcaaaacacccgcatcaccaagggcagattgaagatgttgataagatccaactcaacaatccaacttgtggagatgtgatccagttaagtgtgaaatttgatgagaatgacagggtggaagatattgcctttgtgaattcaggctgtacgatctcaacagcttcagctagcatgatgacagatgctgtaatgggaaaaacaaaagaggaagttgaagaattggcacaggtcttttcagaaatggtccaagggaagtcagatcctcgacaagaggaattaggagacgcagcatttttatctggagtctcaaaatttccacaacggattaaatgtgcgaccctctcctggaatgctcttaaaaaagcgatcgaacgtagcaaatagttaaaagaagaaacagagaaagaaaggaaattatggctgaagaaagagtcgaaccgaaaccaattgatctcggtgaatataaatttggatttcacgatgacgttcaacccattctctctaccgggaagggattgaatgaagcggttattcgtgaattgtctgcagcaaaaaatgaaccagaatggatgctcgaattccgtttgaaatcttttgaaaccttcaaaaagatgcccatgcaaacctggggagccgatctatcagaaattgactttgatgatttgatctattatcaaaaaccttcggataaacctgcccgttcatgggacgaagttccagagaaaatcaaggaaacctttgagcgtatcgggattcctgaagcagaacgtgcttacttagcaggggcttctgctcagtatgaatcagaagtggtttaccacaatatgaaagaagagtttgaaaagttggggattatcttcaccgatacggattctgccctaaaagaatacccagaccttttcaaacagtattttgcgaagttagtaccaccaacggataacaaattggctgccctcaactcagcagtctggtctggtggaaccttcatctatgtaccaaaaggcgtaaaagtagatgtcccccttcaaacttacttccgtatcaacaatgaaaatacaggtcagtttgagcgtaccttaattatcgtggatgagggagcaagtgttcactatgtagaaggctgtacagcaccgacctattcaagcaatagcctccatgctgcgattgttgagatctttgccttagatggtgcttatatgcgttacacgaccatccaaaactggtctgacaatgtctacaacttggtcaccaagcgggctaaagctcaaaaagatgccacagttgagtggatcgatgggaacttaggagccaagacaaccatgaagtacccatctgtttatctggatggggaaggagcgcgtgggaccatgttgtccattgcctttgcgaatgcaggtcaacaccaagatacaggtgccaagatgatccacaatgcccctcacactagctcgtctatcgtgtcgaaatccatcgcgaaaggtggcggaaaggtagactaccgtggacaagtaacctttaacaaaaattccaagaaatcagtttctcacattgagtgtgacaccattatcatggatgatttatctgcatcagataccattccatttaatgaaattcacaactcacaagttgctttggagcacgaagctaaggtttcaaaaatctcagaagaacaactgtattatttgatgagtcgtggtttatctgaatcagaagcgacagaaatgattgtcatgggatttgtagagccctttacaaaagaacttccaatggaatatgccgttgagttaaaccgactcattagctacgaaatggaaggatctgtaggataattcattttcatcaatcaaaaatcacaatggatttgactccattgtgatttttttgcttataatttttcgttgacataacggacgaattcattccaccaaacttttaagaagaagcttttctcaatggttcttcctgctaccatatcgaccgttggctcttgatcttctaagtagccacgtccgattttatctggatcagtgtagtgtaattttccaagattagtgcctgatttgacaggtgctcggaatgattcttggtcactcttgaattgaatttttggttccgcttgactaccttgtttttcgacgatatagaagtctttttttgcaacagctaaaacagtctctgacttcccatccatgatagttgccttactttttccgtagggatctccttctttgacgacaatggaagaaacaaaggtccgtaccacgtagttcatcagagaagaagtagccacaaaacgtgcatacggatcaccgtcaactgcctccactcctaggacaacagtgatcatatggatgccattttgcgtcgttgatgcagcaaaggtgatgccacctttggtagagttgctgacccgtaggccatcaactccagaacggtaattcggcatgccttctagcatcaggttggggttttcaatctgcgtgtttgaaaaaagagcagtgggttttgaagtatatttggtcacttcagggaaatcctgaagtaagtgcttggcaataacagcaatatcataagcactcaattgattttcgtcttctttcccgtcggaatctccgctgatggtttgagtatttaatccggtagcattgattaaatgaggagattgaatgccccattcagcaagtttttgcttcattttttcaacgaagcttttctcagagccacctactttctcagctaaggccaaggcagcggtgctagaatttccaactaaaagagcagtcaataactgttcaaccgtatattggttcgcttccataggaagagaaccagcaccttcgatatcatttaaggctagagctttctcagacagtttgataggatcttttagagaaagttttttttcatgaatggcttcgaaaatcagataagtggtcaagagtgtagatagtccccccacatctcgctttttctctgaatccttttcatataagattttacctgtatcagcttcaacagcaatagcactttgagcaggaagttctagctcgtctgctagaacgacttgataaggtaaactgcataacagcaagataaaagttaaaaaagaaagaaagaattttttcacagttgtttcctcgttgcttagtcctctctattgtatcatacaaatgattaatggaaaatcgtaaaatcatcaattaggctaaaaagtcagtcatagcaaggtttttgaatagtgataaatcgaatattcagaaaatttagtttacttttttttctacttgtgatataatcttaaacaaatctaaaaaaactattggagaattcctatgaaaaaaggtaaagtatttgcagttgccggagtaacacttcttgcagctggattgttggctgcatgttctagttcaaatactagcaaagcaagctcaggcgaagacaagaactatggttatgtctacacagatgatcctcaaactttggactacactgtatcttctaaagctgctacacacgatattactacaaacgtcgtagatggtttgatggcaaatgacaagtatggtaatctcgtaccatcacttgcagaagattggtctgtttcaaaagacggtttgacttatacctacaaaattcgtaaaggggttaagtggtacgatgcagacggtgaagaacatggcgaagtgacagctaaagactttgtaacaggtttgaaacacgctgctgataaaaaatcggaaactctttcactagttcaaggctcaatcaaaggcttggatgattatgtacaaggaaaaactacagactttagccaagttggtgtcaaagcggttgatgattacacacttcaatacacattgaacaaacctgaaaccttctggaactctaaaacaacaaacggaatcttgttcccgattagcacagatttcttgaagagtaagggagatgattttggtcaaccaaacgatgtgaagtcaatccttgcaaacggacctttccttcttaaatctattacgtcaaaatcatctgttgtatttgaaaagaatgacaactactgggataagaaaaacgttcaccttaaagaagtgaaacttacctactacgatggatcagatcaagattcattggcgcgtggcttctctgatggagcttatacagttgctcgtcttttcccagcaagctcaaactttgctacagtagagaaaaaatataaagacaacatttacaacacaccggctggttcaggtgtagcagtccttggtttcaacattgatcgtcaatcttacaaacacacagctaagaaatcagatgctgaaaaatcttctactaagaaagcaatcttaaacaaagatttccgtcaagctatcacctttgccttgaatcgtgaaaactattcagcgcaagtaaatagtaaagcatttgctaaaccagctatccgtaatacctatacagctcctgcttttgtacaagttaatgggaaagactttggagatgtggttgcagataagttgactacttatggagaccaatggaaaggtgtcaaccttgcagatggtcaagacggtctttacaacaaagacaaagcaaaagcacaacttgaaaaagcaaaagctgaacttcaaaaagatggcgttcaattcccaattcatattgacgtaccagtagcacaaaactctacaaactttgtttcacggatgcaatcattgaaacaaacagtggaagatactcttggtaaagacaatgtcgttcttgaccttcaaatgatggaccaagacgaagtgttgaacatcacattgaatgttccatcagctgcagatgcagattgggatcttcaaggattggtcggatggaacccagactacgatgatccatcaacttaccttgatactcttcaaccatcatcagaagaccaaacaaaagtttaccttggttttgcaggtggtgtagataatgcttcagccaaagcagttggcttggatgagtatgcgaaacttcttgcagatgctaatagcgaatcacttgatgtagctaaacgttacgaaaaatatgctactgctcaagcttggttgagtgatagtgccttggtaatcccaacaatgtcaagcacaggcgcagcaacagttgtttctaaagtggttccattctctggcccatcagctcaaacaggtaacaaaggatctgcttacttcaaatatgtagaagttcaagatgaacctgttactaagaaacaatacgaacaagcacgtgaaaaatggcaaaaagaaaaagctgagtcaaacaaaaaagctcaacaagatcttgaaaaacacgttaaataattaattattgcttttcattagaactttctcttctaggggagaaagttcttttggacattaaaggaatgaaatatgaaaaaatatgtttttatgcgtattttgcgttcgttagtgtcgatctttctcgtcacgacattaacctacatgattatctatacgctaacaccgagaaatctcatctttaaaaatgaccccaactacaataaagtagcgaagacaaaagattcgaagatcaactacgaaaatactgtctacgatcgcatgggttatttggaatacatggattcaaagagcttgcaacaaaaagcaagtaaagaagattcttccgtaacggttgatgcgacaactgctaatgaaaagatctacaaaaaatatattgaaaaattaggtcatggttggcagttgaaacgtttcccagagagtaagtctttctatgcggtgcgtgaaattccggtttttgaacgtgtcatcagcttctatgcgaatttgattcagtttgatcatccaggttgggtgaaagatgcctcaaatccaaatctcaaacgctatatccgtattgaaaatgatccatctattggatggtctgtagtgggttctggtacgaaacacaaatacctcttgtactttaatggtcagttcccatatgtacaccaaaactttgtaaccttaaaccttggaaattcatatccaacttattcaaatacccctgttcttcaagttattacccaaggacaaggaacgactaagaagactgaagtgaacttcccaacaggtaaaaagacatcttccatcgatatctactcacgtacctacaaatcaccaagtaaggcagattcacaagatatcagtcgatttggtaaaggggatgcctatacagcaacgttgagcaactatgagaatccatccatgattgcatcttcttcaatcattggtttgattggtattgcgattgcctacttgattgcgatcccactaggatcttatatggctcttttcaaggactcatggtttgatagcatctctactgcggtcttgacatttatgatgtctctcccaaccattgcccttgtctatatcgtgcgtctagcaggttcattctttggacttccagactcattcccagtacttggagcacaggactggcgttcatatgtattgccgtctctgattcttggtttattgagtgcgccatttatcgccgtttggattcgtcgttatatgatcgatatccattcgcaagatttcgtccgttttgctcgttcaaaaggattgtcagaacgtgagatctcaagaaaacacatcttcaaaaatgcgatggttccactagtttctggaattccaggggctatcattggagttatctcaggtgcgacgttgactgaaacagtcttcgctttcccaggtatgggtaaaatgttgattgactctattaaagcatcaaacaacaccatggtcatcggacttgtcttcatcttcacatcacttggtatctttgctgccatgttaggtgatatcttgatgacagtgcttgatccacggattaaattaacgaatacgaaaggaggcaaataatggctacaatcgataaaaataaatttcagtttgtaaaacgcgatgactttgcctctgaagtaatcgatgctccagcgtattcatactggaaatctgtattcagacaattcttgaaaaaaagaaccacgatcattatgcttgctattttgattgggattctcttgatgagttttgtctacccgatgttttcaaattttgattacaacgacgtaagtaaggtaaatgacttttcagcacgtttgaatccaccaagtgccaaagctttctttggtacagataataacggtaaatccctctttgatggagtttggtttggtgctcggaattccattatcatttctttcatcgccactgttattaacgtggttgtcggagttatcgttggtggaatttgggggatctcaaaatccatcgaccgtatcatgatggaagtttataacgttatttcaaacattccatttatgttgatcgttatcgtcttgacttactcaatgggatctggtttctggaacttgattcttgccatgtccttaactggatggatcggaattgcctataccattcgtgtccaaatcatgcgttaccgtgatttggagtacaaccttgccagccgaacattaggaacaccaactttgaaaattgttacgaaaaatattttgcctcaattggtatctgttatcgtgacacaaacatcacagttacttccaagctttatttcttatgaagccttcctttccttcttcggacttggtcttccaatcacagttccaagtttgggacggttgatttctgactattctcaaaacgtaactacaaatgcctacctattctggattccgcttactgttttgattttagtatccttgtcattctttatcgtcggacaaaacttggccgatgccagcgacccacgtacacatagataggaggagtagatatgacatcaaataacaatattattttatctgctcaagatatcgtagtggaatttgacgtgcgcgatcgcgtattgacagctattcgtggcgtatcgcttgagctagaagaaggtgaagttcttgccttagttggtgagtcaggttcagggaaatcagttttgacaaaaacgttcaccggaatgttagaagataacggccgtattgcccaaggttcgattaaataccgtggtcaagaattgacagatttgaaatcgaataaagattgggaaaatattcgtggatctaagatcgctacaatttttcaagacccaatgacaagtttggacccaatcaacacaattggttcacaaattacagaagtcattatcaaacaccaagggaaaacagctaaagaagctaaagaaatggctttggactatatggagaaagttggaattccagatgcggaacgtcgttttgatgagtatccattccaatattcaggtgggatgcgtcaacggatcgttattgccatcgccttggcctgccgtccagatatcttaatctgtgacgaaccaacaacagccctagacgtaaccattcaagcgcaaatcattgatttgttgaaatcccttcaaaaagaataccaatttacagttatctttatcacccacgacttaggtgtggttgcaagtattgcagataaagtagccgttatgtatgctggagaaattgttgagtttggtaaagtagaagaaattttctacgatccaaaacatccatacacatggagcttgctttcaagcttgcctcaattgtcaacctcagatggtgatctttactctattccaggaactccgccatcattgtatgctccaatcaaaggagatgccttcgcacttcgttcagactatgcaatgcagattgattttgaagaagaggcacctgctttcaaagtaaccgatactcactgggctaagacatggttgctccatccagatgcaccaacagttcataaaccagaagtaatcgaaaaccttcacgaaaagattggctcaaaaatgggcttcactcacattacagaataggaggaaggaaatgactgaaaaattagttgaaattaaagatttagaaatttccttcggtgaaggaagtaaaaaattcgttgctgtaaagaacgccaactttttcattaataagggagaaactttctctcttgttggtgaatcaggaagtggtaagacaacaattgggcgtgcgatcattggtttgaatgatacaagtgctggagaaattatttatgacggtcgcaagatcaacggaaaaaactctcatagtgaaaaatcagagttgatccgtaaaattcaaatgatcttccaagacccagcagcaagtttgaatgaacgtgcaacagttgattatattatctctgaaggtttgatcaaccaccatttgtttaacagcgaagaagaacgtcaggaaaaagtaaaaaatattatgcatgaagttgggcttctagcagaacatttgacacgttatcctcacgaattctcaggtggtcaacgtcaacggatcggtattgcccgtgcacttgtcatggaaccagaatttgtcattgcggatgaaccaatctcagcccttgacgtttcagtacgtgcacaggtcttgaaccttttgaaaaaattccaaagagaattaggcttgacctatctctttatcgcccatgacttgtcagttgtgcgcttcatttctgaccgtattgcagttatctataaaggggttattgtagaagtagcagaaactgaagagctatttaaccacccaatccatccatacacacaatccctactttcagctgtcccaattccagatccaattctagaacgtaaaaaagttctaaaaatctacgatccagaacaacatgattactctgaagataaaccacaaatggttgaaattaaaccaggtcattatgtatgggctaataaagctgaagaaaacaaatacagacaagaatataaatagagaggattccctctctatttttttatttcaaaaaaactttcaaaaaaataaaaaattttggaaaaaagtgttgacagtaaggagaggtcatgatatactaatatagttgtcgcgcgagagcgacaaagacctttgaaaactgaacaagacgaaccaatgtgcagggcgctataacgaaagttatagtaactgaacaataaaaaacaataaatctgtcagtgacagaatgagtttaagacaaacaattattttaatgagagtttgatcctggctcaggatgaacgctggcggcgtgcctaatacatgcaagtagaacgctgaagcttggtgcttgcaccgagcggatgagttgcgaacgggtgagtaacgcgtaggtaacctgcctcttagcgggggataactattggaaacgatagctaataccgcataaaagtcgacatcgcatgatgttgacttgaaaggtgcaattgcatcactaagagatggacctgcgttgtattagctagttggtgaggtaacggctcaccaaggcgacgatacatagccgacctgagagggtgatcggccacactgggactgagacacggcccagactcctacgggaggcagcagtagggaatcttcggcaatgggggcaaccctgaccgagcaacgccgcgtgagtgaagaaggttttcggatcgtaaagctctgttgtaagagaagaacgagtgtgagagtggaaagttcacactgtgacggtaacttaccagaaagggacggctaactacgtgccagcagccgcggtaatacgtaggtcccgagcgttatccggatttattgggcgtaaagcgagcgcaggcggttagataagtctgaagttaaaggctgtggcttaaccatagtacgctttggaaactgtttaacttgagtgcagaaggggagagtggaattccatgtgtagcggtgaaatgcgtagatatatggaggaacaccggtggcgaaagcggctctctggtctgtaactgacgctgaggctcgaaagcgtggggagcaaacaggattagataccctggtagtccacgccgtaaacgatgagtgctaggtgttgggtcctttccgggactcagtgccgcagctaacgcattaagcactccgcctggggagtacgaccgcaaggttgaaactcaaaggaattgacgggggcccgcacaagcggtggagcatgtggtttaattcgaagcaacgcgaagaaccttaccaggtcttgacatccctctgaccgctctagagatagagttttccttcgggacagaggtgacaggtggtgcatggttgtcgtcagctcgtgtcgtgagatgttgggttaagtcccgcaacgagcgcaacccctattgttagttgccatcattgagttgggcactctagcgagactgccggtaataaaccggaggaaggtggggatgacgtcaaatcatcatgccccttatgacctgggctacacacgtgctacaatggctggtacaacgagtcgcgagtcggtgacggcaagctaatctcttaaagccagtctcagttcggattgtaggctgcaactcgcctacatgaagtcggaatcgctagtaatcgcggatcagcacgccgcggtgaatacgttcccgggccttgtacacaccgcccgtcacaccacgagagtttgtaacacccgaagtcggtgaggtaaccatttggagccagccgcctaaggtgggatagatgattggggtgaagtcgtaacaaggtagccgtatcggaaggtgcggctggatcacctcctttctaaggaaatggaaacctgtacgttggtcttgtttagttttgagaggtcttgtggggccttagctcagctgggagagcgcctgctttgcacgcaggaggtcagcggttcgatcccgctaggctccattaacactgtaagggtgttaagattgaacattgaaaattgaatatctatatcaaatagtaacaagaaaataaaccgaaacgctgtaaatatttaaagagtttaggtcgcaagaccaaaataaggttaagttaataagggcgcacggtggatgccttggcactagaagccgaagaaggacgtgacaaacgacgaaatgctttggggagctgtaagtaagcgacgatccagagatgtccgaatgggggaacccactagctaatggctagtactcctatctgttaaggataggtagaggaagacgcagtgaactgaaacatctaagtagctgcaggaagagaaagcaaaagcgattgcctgagtagcggcgagcgaaacggcaggagggcaaaccgaagagtttactcttcggggttgtaggactgcaatgtggacttaaagaatatagaagaatgacatgggaaggtcagccaaagagagtaagagcctcgtattcgaaatagtctttatacctagcagtatcctgagtacggcgggacacgagaaatcccgtcggaatctgggaggaccatctcccaaccctaaatactctctagtgaccgatagtgaaccagtaccgtgagggaaaggtgaaaagcaccccgggaggggagtgaaatagaacctgaaaccgtgtgcctacaacaagttcgagcccgttaatgggtgagagcgtgccttttgtagaatgaaccggcgagttacgatatgatgcgaggttaagttgaagagacggagccgtagggaaaccgagtctgaatagggcgtcttagtattatgtcgtagacccgaaaccatgtgacctacccatgagcaggttgaaggtgaggtaaaactcactggaggaccgaaccagggcacgttgaaaagtgcttggatgacttgtgggtagcggagaaattccaaacgaacttggagatagctggttctctccgaaatagctttagggctagcgtcgacattaagattcttggaggtagagcactgtttgggtgaggggtccatcccggattaccaatctcagataaactccgaatgccaatgaattatggtcggcagtcagactgcgagtgctaagatccgtagtcgaaagggaaacagcccagaccaccagctaaggtcccaaaataattgttaagtggaaaaggatgtggggttgcacagacaactaggatgttagcttagaagcagctattcattcaaagagtgcgtaatagctcactagtcgagtgaccctgcgccgaaaatgtaccggggctaaaacaatttaccgaagctgtggatacctttataggtatggtaggagagcgttctatgtgtggagaaggtgtaccgtgaggagcgctggaacgcatagaagtgagaatgccggtatgagtagcgaaagacaggtgagaatcctgtccaccgtaagactaaggtttccaggggaaggctcgtccgccctgggttagtcgggacctaaggagagaccgaaaggtgtatccgatggacaacaggttgatattcctgtactagagtatgtagtgaaggagggacgcagtaggctaactaaagcgtgcgactggaagtgcacgtctaagcagtgaggtgtgaattgagttaaatgcttaattctataacattgagctgtgatggggagcgaagtttagtagcgaagttagtgacgtcacactgccaagaaaagcttctagcgtttaaacatactctacccgtaccgcaaaccgacacaggtagtcgaggcgagtagcctcaggtgagcgagagaactctcgttaaggaactcggcaaaatgaccccgtaacttcgggagaaggggtgctggctttcagtcagccgcagtgaataggcccaagcaactgtttatcaaaaacacagctctctgctaaatcgtaagatgatgtatagggggtgacgcctgcccggtgctggaaggttaagaggagtgcttagcgtaagcgaaggtatgaattgaagccccagtaaacggcggccgtaactataacggtcctaaggtagcgaaattccttgtcgggtaagttccgacccgcacgaaaggcgtaatgatttgggcactgtctcaacgagagactcggtgaaattttagtacctgtgaagatgcaggttacccgcgacaggacggaaagaccccatggagctttactgcagtttgatattgagtgtctgtgccacatgtacaggataggtaggagccattgagatcgggacgccagtttcgatggaggcgttgttgggatactacccttgtgttatggccactctaacccggtaggttaatcatctacggagacagtgtctgacgggcagtttgactggggcggtcgcctcctaaaaggtaacggaggcgcccaaaggttccctcagaatggttggaaatcattcgcagagtgtaaaggtataagggagcttgactgcgagagctacaactcgagcagggacgaaagtcgggcttagtgatccggtggttccgtatggaagggccatcgctcaacggataaaagctaccctggggataacaggcttatctcccccaagagttcacatcgacggggaggtttggcacctcgatgtcggctcgtcgcatcctggggctgtagtcggtcccaagggttgggctgttcgcccattaaagcggcacgcgagctgggttcagaacgtcgtgagacagttcggtccctatccgtcgcgggcgtaggaaatttgagaggatctgctcctagtacgagaggaccagagtggacttaccgctggtgtaccagttgtctcgccagaggcatcgctgggtagctatgtagggaagggataaacgctgaaagcatctaagtgtgaaacccacctcaagatgagatttcccatgattttatatcagtaagagccctgagagaagatcaggtagataggttaggagtggaagttgtgtgagcaatggagcggactaatactaatagctcgaggacttatccaaagagtcagaagatattgacaacgtgagtttaacttgttagaatatagatgttcaattttgaatgtttaatcattcagagttaagtgacgatagcctaggagatacacctgtacccatgccgaacacagcagttaagccctagaacgccggaagtagttgggggttgccccctgtgagataaggtagtcgcttagctttattccgccatagctcagttggtagtagcgcatgactgttaatcatgatgtcgtaggttcgagtcctactggcggagtacataagaaagtgaagatcaatttttattgatctttttatttttatcttataaaactaaaggctccgtttttatacggagcctttagttaactagttatttggaaagaatgcttgatataaagctttaatagctttttcttcttgatccttacttacaacgaacataatagagacttcactagaaccttgtgagatcatttgaatattcacttcgttttctgatagtgctttagctgcagttgcggtaacccctacttgacttttcattttttcaccgacgatcataatgattgaaagatcgtgttcgatttcggcggtgtctacttctagcttttgcgttaattgttttaaaatttcttgttctttaattggagtaagctcacgtgaacgtaagataatggacaggtcgtcgataccagttggcatatgttcccaactaatattaagatcttctagtacttgtaaaacttttcgaccaaacccaacttcacggttcatgaggtatttggtcatattgatacttacaaaccctgaatctccagcgattcctacgacagttacatgatcatttgaatgttccaaaacaattcgggtccctgggtggtccggattgtttgtatttttaatgactaatggaattttacctctgtaggctggcacaagagcttcatcatgtaaaactgaaaagccagcataggctaattcacgcatctctttgtaagttaattcaggaatagaatgtgggtgtttaatgatacctggatgtgctgcaaaaataccatttacgtctgtaaagttttcgtataagtctgcttttacacctgctgcaatgatcgatcctgtaatgtcggatccaccacgagaaaatgtacaaatatccccatcttgggtaacaccaaagaatcctggaatgacaatcacttcacttgaatcttttagttcttcaattttatcgtaactagatggtaaaatacgagcgttagaaggttctgcagtgaccgtgattcctgcctcttttggatggatatatcttgcttctaatccattctgattgaaataggcagcaatgagtttagcattgttattttcacctgctgctaagaatgcatcgtatgtaaatggatttccttttttaggcaaatttgtcagatcatagatatcttcagcaatttcctgaataatagaatctttgagacccaattcttctgtaatggcacgataacgttcaataatccactgttgtgtttgtgtgacatccttatctgaagtaaattctttataataccggatcagagcatctgttacttttgtgtcttcagcgttgcgttttcctggagctgatacaactacaaatcttctttctggatcatctttaatgatattaagtactttttttaattgagaagctgatgctagagaacttccaccgaatttagttactttcatattttctccttaatagtttcattaatacattataccaaagttcagttattgatacaatgtatttacaaatagggcataaaataattgattctgtagaggggagaaattgtaattattcaaattttacaattttgttacatcttatagatatattttactattttacttttttgtggtatgatatgttataattcaaaagttttaatgtcaaaatattttatatttaaacaaaaggagtctgtgatgtttgaaacaattttgtattctgtcgaaaacgacctcgcgacaatctctttaaatcgtcctgaagtatccaatggttttaacattccaatgtgtcaggaaattttagctgccctggaagatgcagaaaaaaatgaggaagtaaaattcattattctatcagcagaagggaaaatcttttcagttggtggagatttgagcgaaatgaaacgcgcagtcgatgcggatgacatcgagtctcttgttttaattgctgaattagttaatacgatttcaaagaaaattaagcaattaccaaaaccggttattatggtggcagatggagcggttgctggagcagctgctaacattgcagtagctgttgatttttgtattattagtgatcgtactaaatttatccaagcctttgttggggttggtttagcaccggatgcgggtgggttattcttgttaggaaaagccattggcatgtctcgggctactcatttagtaatgacgggtgaagccttgactgctgaaaaggcatttgattatggcctagcttatcgtgtttgtgaatctgaaagactcgataaaacagttgagcaattgcttaaaaaattaagaagaggatcttcaaattcttatgctgccatgaaagaaatggtttgggaagcattcttgaaagaatgggaccaatatgcgggtcttgaattggatttgcaaaagaaactagcatttacagaagatttcaaggaaggggttattgcctactctgagaaacgtcggccacaatttaaaggaaaataaatttgtaatttttctatgttttgtgaaaaaatgcttgcaaattattttcatttttgataaaatttgactatcaaagtaaaattaggaggtggagttttgaattaccaattagttaacgactatttaacatccatctttaataatgttttggttattgaggagtcgagtctaagagcaagtcgattcaaagatgtttctattaaagaaatgcatacgatcgatgtgattggttcgacaccgaatgcaaccccgagtgatatttcacgggagttgatggtgactttggggactgtcacgacaagtttgaataatcttgagcgcaaagggtatatcgaaagaagaagatcggaagttgatcgccgggttgtacacttgagtttaacgaagaacggtcgtctactttatcgtcttcatcagcaattccataaacggatggtcaaccagattattggagatatgagtcccgaagagaagaaagtgatgcaaaaaggattgcaaaatctgtatcgtttcttggaggaaattaaataatggtctttgctaaaattagtcaagttgctcattatgcacctgaccaagtcgtatcaaatgatgatttggctgagatcatggatacaagtgatgaatggatcagtagtcggacaggtatccttcggcgtcacatttcaaaagatgagacgacaagtgatctagcaacaattgttgcacaaagattattagcaaaagcaaacttagacgctgaggaaattgattttatcgttgtcgctacgattacaccagatagcttaatgccatcaactgcagcccgggtacaagctaatattggagctactcgagcttttgcatttgatctgactgcagcatgtagcggatttgtatttgcattagccactgctgaaaaatacatttcttcaggtatgtaccggagaggaattgtgatcggtagtgagacgctttcaaaagtattagactggtcagaccgttctacttcagtcctttttggagatggagctggtggtgtcttgcttgaagcgagtgatcaaaaatcgtttttggctgaaaatctttttacggatggtagccgaggtgctagtctggagtcttgctatttgggtttgtcttctccttattcagatgaagtttctgatcgaagatatctgacaatggacggacgggcagtatttgattttgctattcgtgatgtcacgaaaagtattcaaaaaattatagcagatgcctctatggaagcagaagagattgactattttctgttacaccaggcgaatgaccgaatgttagataagatgtcaaaaaaactgggtgtctctagagagaaaatcccagcaaatatgatggaatatgggaacactagtgctgctagtatccccattctattatcggagtgtgtcgagaatcatcgaatcaagatggatggaagtcaaaaaattcttctgacaggattcggtggaggtttgacatggggcacacttcttgttacaatctagttaaacatgtggaaacacattttaaaaatttatatattattttttaaggaggcctatcatggcagtatttgaaaaagtacaagaaattatcgttgaagaacttggtaaagaaccatcagaagtaactcttgaatctacattcgaagatttagaagcagattcattggatttgttccaagttatctctgaaattgaagatgcttttgacatccaaatcgaaactgaagaaggattgtctacagttggtgaccttgtcgcttacgtagaagaaaaaacaaaataatgatagatgagagtatcgaaagatattctctcttgtttaggtaatagtttgaggctcaaagaaacaatcttttaaactcaaactattacttaagcgaaaaaagaggtaggtataatgcaaacacgaattactgaactattgaatattaaatatccaatcttccaaggtgggatggcatgggtcgctgatggtgacttggctggagccgtttcaaatgctggtggactcggaattattggtggtggtaatgcccctaaagaagtggtaaaagctaatattgatagagtaaaacaaatcactgacaaaccattcggtgttaatatcatgcttttgtcaccatttgcagatgacatcgtcgacctcgttatcgaagagggtgttaaggttgttacaacaggtgccggaaatccaggtaaatatatggagcgtttccacgaagctggaattacagtaatcccagttattccatcggtagcacttgctaaacgtatggaaaaacttggagcggatgctgttgtcgcagaaggtatggaagctggtggtcacatcggtaaattgacaactatggctcttgttcgccaggttgcggatgcggtatctatcccagttattggtgctggtggtgttgctgatggacgtggtatggctgctgttcttatgcttggagcagaagctgttcaggttggtacgcgtttcgctgttgctaaggaatctaatgcacaccaaaacttcaaagataagattttgaaggctaaagatattgatactgttatttcagcctcagttgttggacaccctgttcgtgcgattaagaataaattggctacagaatataaccaagctgaaaaagatttcttggctggtaagaagactcaagaggaaattgaagagcttggtgcaggtgcccttcgtaacgctgttgttgatggagatgtggaatatggttcagttatggctggacaaattgcaggtcttgttcgtaaagaagaaacatgtgcagaaatcttggaagacctttacacaggtgctgccaaggtgattaaagaagaagctgctcgttgggcagatgtaaacgtctaaaaacgtcgaaaggattaggatagtgacaaaacgtgcgttcttatttgctggtcaaggggctcagaaattgggcatggcgagcgatttgtatgcgacttatcccgttgtcaaagagacatttgatacggctagtcgtattctaggttatgatttgcgtgaattgattgattctaacgaagaaaaacttaatcagacacgctatactcaaccagctattttgacaacgtcagtagccatttatcgccttttggcagaaaatggtatcactcctgatattgttgccggtctctctttgggtgaatattctgccctagttgcggctggagcactctcatttgaggatgcggtagccttggttgctaaacgtggagaattcatggaaacagcggctcctgctggaagtgggaaaatggttgcagtcatgaatacagatccaagtttgattgaagaaatctgtcaaaaagcatctgaaaagggtgtggtaacgcctgctaactataatacaccagcacaaattgttattggtggtgaggttgcggctgtggactatgctgtggaactattgcaggaagcaggtgccaaacgcttgatccctttgaatgtgtcaggtccattccacacagccttactggaatctgctagtcaaaaattggcggctgaactagaaaaagtatcatttaatgattttgatcttcctttagttgggaatacagaagctactatcatgaagtcagaagatgtgaaagcacttttggcccgtcaagtaaaagaaccggttcgtttctatgattcaattgctacgattcaagactttggtgtagatgaagtcatcgaaattggacctggaaaagtcttgtcaggattcttgaagaaaattgataaaactcttccaactcataacgtcgaagatcaggctagtctagatgcacttctgaatgcttaaaacgaggtaaagatggaacttaaaaataaaaatgtttttgtaacaggttcaacacgcggaattggattggctgtggctcataaatttgcgagtctcggtgccaatgttgtcctaaatggacgttctgaaatttctgaggacttgcttgcacagtttgctgactatggtgtgactgttgttggtatttctggggatatttctaatggcgaagatgcgcaacgtatggtggctgaagcaattgaaaagcttggaagtgttgatgttttggtcaataacgctggcatcacaaacgacaagttgatgttgaaaatgactgaagaagattttgaacgggtcttgaaaatcaacttgacaggtgcctttaatatgactcaagctgtcttaaaaccgatgtctaaagctcgtcaaggggccattatcaacatgtcctctgttgttggtctaatggggaatatcggtcaagctaactatgcggcttcaaaagctggtttgattggtttcactaaatcagtagcgcgtgaagttgcggctcgtggcgttcgtgtgaatgccattgcacctggtttcattgaatcagatatgactgatgctattccagagaaaatgaaagatgccatgctagctcaagtgccaatgaaacgaattggtcaagctgaagaagtggcagaagttgcggctttcttagcaggtcaagaatatttaactggtcaaacaattgccattgatggcggaatgactatgcaataatgaatgctcactgatcgaaaatcacttacttaaatatccatccgacaaaaggagaatatatatgtctacaaatcgtgttgttgttacaggttacggtgtaacctcaccaatcggaaatacaccagaggagttctggaatagccttcatgaaggaaaaattggaatcaagcccattacaaaatttgatgcttctgaaattccagtctttaatgctggtgaaattcaagatttcccattcgataaatatttcgtgaaaaaagatcaaaatcgtatggatacttactcattgtatgcaatctatgctgcgatggaagctattgaaaattcaggcttgaatatggaagaagaagaccgcgatcgtgtaggtgtgattgtctcatctggtatcggtggtttgcaagaattggaagatcaaattatccggatgcatgaacgtgggatgaagagaatccaaccaatgtttattccaaaagctctttcaaacatgggtgctggaaatatcgcacttaagattggggctcaaggggtatgtaaatccgtgacaacagcttgtgcttctgccaacgatgccattggtgaagctttccgtgaaattaaatttggtatgcatgatgttgttttggcaggtggtgctgaagcttcgattactaagattggtatcggtggtttcaatgcccttacggccctttcaacaacggaagacccagaacgttcatctattccatttgacaaagaccgcaatggttttgtgatgggggaaggtgcaggggttcttgtcatcgaaagtttggaacatgcccaaaaacgtggtgctaatattttagctgaaattgttggttacggttcaaactgtgatgcctaccacatgacaacaccaacaccagatggttcaggtgcggctaaagcgattaaattagcgatcaatgaagctggtatcaaacctgaagatgtcgattatgtcaatgcgcatggtacctctacacctgccaatgagaaaggtgaaagcggagctattgtttctgtacttggtaaagaagttcctgtatcatctactaaatcatttacaggacacttgcttggtgctgctggtgcggttgaagcgattgctaccatcgaagcgattcgtcacagctttgtaccaaaaactgctggtaccaaagaattgtctgactatatcgaagcaaacgttgtttatggtgaaggtcaagaagcggatattcagtatgctatctcaaatacctttggttttggaggacacaatgctgttctggcctttaaacgttgggagggttaattcatgaatatttctgaaatcaaagatttgttggctcaatttgatgcgtcaactttgcgtgaattctcatataaaaataatggcgaagaattgaatttgagtaaaaaccaaacgagttcagttgcggctacagcggttgctcctgcagttgaagtggtagcaactcctcaaactcctgtagtagcccctgttgttgaagccccagcaactccagctgtagcggctgaaccagttgctgctccagctcaggctgcagaaggtgatgtggttgaaagtccattggttggggtggcttacttgtcgccagcaccggataaatcagcctttgtatctgtaggagacaaagttactaagggtcaaacactcttgattatcgaagccatgaaagtgatgaatgaagtcccagcacctaaagatggggtagtcactgaaattttggtaacgaatgaagaaatggttgaatttggaaaaggattggttcgaatcaaatgacaattgatattaatgctattcgtgaggctttgccgcatcgttacccaatgcttttggtggatcgcgtattggaaacaagcgaagatacgattgttgccattaagaacgtgacaattaatgaaccattttttaatggacattttccacaatatcctgttatgccaggtgttctcatcatggaagctttggcacaaacagcaggtgtactagagttgtcaaaacctgaaaataaaggaaaattagtcttttatgcagggatggacaaggtgaagtttaaaaaacaagtcgttccaggagatcaactggtgatgacagctacttttgtcaaacgtcgtggaaccattgctgttgttgaagcgaaagcagaggtagacggtaagcttgcggcttcaggaacgcttacgtttgcaattggaaattaagaaaggcctatctatgtttcgtaagatcttaatcgccaatcgtggtgagattgcagtgcgcattattcgtgcggctcgtgaacttggcatcgagacggttgcggtgtattctactgctgataaagaagccttgcataccttactagcggatgaggcagtctgtattggccctgctaaatcaacagaatcttatttgaatatgagtgctgtcttgtctgcagctgttctaacaggagcagaagctatccaccctggttttggatttttaagtgaaaactcaaaatttgcgaccatgtgtgaggaagtgggcattaaatttattggtccttctgctaaagtcatggatttgatgggggataagattaatgctcgtaaacagatgatcaaagcaggagtacctgttattcctggatcagatggtgaagtgtatactgctgaagaagccctcgagattgcagagcgtattggttaccctgtgatgttgaaagcatctgcaggaggcggtggtaaaggaattcggaaggttgaaaaaccagaagatttggttgctgcttttgaatctgcttcctcagaagctcaagctgcttttggaaatggtgccatgtatatggaacgggtgatttatccggcacgccacattgaagtacagattttagcggatcagcatggacatgttattcacttaggtgaacgcgattgttctcttcaacgaaataaccaaaaagttctagaagaatccccttcgattgctattggaaaaacgcttcgtgatcggattggttctgcagctgttcgtgcagctgaatcagttgggtacgagaatgctggaacgattgaattcttgtatgatgaaggcaagggtgagttctactttatggaaatgaatacccgtgtccaagtagagcatcctgtcacggaatttgtaacaggagttgatatcgttaaggaacagattaaaatcgcagctggccaagaattatccgttactcaagaggatattgtcattaaaggccatgcgattgaatgccggatcaatgcggaaaatccttccttcaactttgcaccaagcccaggtaagatcaccaatctctatcttccaagtggtggggttggcttgcgtgtggattctgctgtgtatcctggttatacgattccaccatactatgatagtatgattgccaagatcattgtccatggtgaaaatcgctttgatgcactgatgaaaatgcagcgtgctctttatgagttggaaatcgatggtgtcacaaccaatagcagtttccagttggatttgatttcagattcacatgtgatcgctggtgattatgacactgcatttttgatggaacaattccttccaaattataataaggaatgatgaaaaagcctggacttgtgagggaagtatgaacatcatcttcacagtttcaggcttttatagtaatgctgcagatactgtagcatattataaggagtaagtaatggcattattttctaaaaaagataaatatattcggatcaatccgaataggtcagcctggaaggagcctcagccaaaacctgaagttcctgatgaactattttcacaatgcccaggttgtaaacataccatttaccaaaaggatttaggtagtgaacgggtatgcccaaactgtggctataccttccgtatttctgctaaagaacgcttggcgctgacagtggatccagctagctttgaagaaatgtttataggaatcgaaacgacagatcctttgaattttcctaattataagaagaaactagcagcagtgagggaaatgacaggactggatgaagctgtcctgactggaactgccttgattaaagggcaaaaagttgcgcttgggatcatggattccaactttatcatggcttcaatgggttctgtagtaggtgaaaaaattactcgtttatttgaatttgcgacaaaagaaaaattgccagttgttctatttaccgcttctggtggtgctcggatgcaagaaggaatcgtgagtttgatgcaaatggcaaagatttctgcagctgttcaacgccattccaaagaaaaattattctatttgacggtattgacagatccgacaaccggtggggtaacggcttcatttgctatggaaggtgatattatcatggcagagagtcaagccttggtcgggtttgccggtcggcgcgtgattgagtctactgtacgtgaacaattgccagatgatttccaaaaagcagaatttctacaagaacatggatttgtagacttgatcgtggagagaagccaaatccgagcaacagttggacaattattggcccttcatggaggtaaacatgagtaaaataacacagattattaaagaggcacgtgaccaaggaagattgactgcgcttgattttgctcaaggaatttttgatgattttatcgaattacatggagaccgaaacttccgtgatgatggtgcggtgattggtgggattggacgattaggcgatcaaacggttacagtcgttgggatccaaaaaggaaaaaatcttcaggataatctaaaacgtaattttgggcaaccccatccagaaggctatcgaaaagctttgcgcctcatgaagcaagcggagaaatttggtcgtccagttgtgacctttatcaatacagcgggtgcttatcctggtgttggtgctgaagaacgaggacaaggggaagccattgcccgcaacctcatggaaatgagtgatctaaaagttccaattatcgcgattatcatcggagaaggtggctctggtggtgccttggctcttgctgtggcagataaggtctggatgcttgaaaattccatctatgcggtcttgagtccagaaggttttgcctctattctttggaaagatggaagccgtgccatggaagcagcagagttgatgaggattacttctcacgaattgttaaatatggaaattgtcgataaggtgattcccgagcatggattttcgaatggggaactactggctcaagtgaagaaggaattacaggaagagttaaaggttttacaagctttacctctcgaagagcttctagagcaacgctaccaacgttttcgtaaatattaaaaaactgagcttgcaatttgcaagactcagtttttttaaactttattttggtgcgatgacttctgcgccacccatgtatgggcgaaggacttctggaatggtcacagaaccgtcttcgttttggtagttttcaagaatagcagcgacggtacgtccgacagctaaccctgaaccgttcaaagtgtgaaggagttttaccttgccatctgcttcatcacggtagcggatttgcgcacggcgagcttggaaatcttctgtattagaacagcttgagatttcacggtaggtgttttgcgctggaatccatacttccaagtcataagtcttggcagctgagaagcccatgtctcccgttgagagagctaccacacggtatggaaggttgagtttttgaaggatattttcagcattgacaaccattttttccaattcatcatatgattcttctggtttggcaaatttcaccatttcaaccttatggaattggtgcaaacggatcaagccacgggtatcacgaccggctgaaccagcttctgaacggaaagatggactcatagcggtgaagtagattggaagatctttcccatcaagaatttcatcgcgatagtagtttgtcaaaggaacttcagctgttggaatgaggacataattggtatcgctaagttcaaaagtatcttccttgaattttggatattgaccagtaccaaacatagaatcatggttgaccatgtaaggagggatgacttcagtgtagccttccttgccatgttcatccaacatgaagttgtagatagcacgttctaagcgagctccaagtcctttgtagaagaggaaacgagcaccagtgactttagccccgcgttcccagtcaaggataccaaggtcttcacctaaatcccagtgagcttttggttcaaagccaaattcgcgcggtgttccccaacgacgaacctcaacattgtcatcctcatctgctccaacagggacactatcagcagggatgtttggaagggtagtagtgaattcagttaattttgcatcgatttcagccaattctgtatccagggctttgacttcagcagagagggtttgcatggcagcaatcttatcatctgcattttccttgttgcgtttagcttgtgcgatttcagcagatacagtgttacgctctgctttgagattttctactttgactaagatatctcgacgtttggcatcgatttctttcatttcattcaaaatagctgcatctacgccacgtgttgccaattttttagcaaccgcatcaaagtctgtacgaatccgtttaatatctaacatagcttctcctttaacaaaaaacacacctgttagagtgttggagtggcagagccacggttccatccaacttcacaggtgtgcacttgattcaatattgtattttaaagaaacggtagaatttcaattaagatttctatctgctcgcagcaaccgcagactttctgaaagagcctcttaacttacttatccgtttgcgtctattatacaagaaaagatcctattttgcaaatagatttttaattttagccgtgatggtttggatcaatgtaggaagtttgacaattttatcatttcctagatgttcccgagcaatctttaaaatttttccagagtcttttgaagcaaagagaaattttgattctctagtatagatttcaaaatggcggctaattttacgtccggatacattggctccgatttgatcgatttcttgccagggaatttggatgtagtcttcaacattagcatccgcataaaattcaaaagcggcattcccgactaggatttttccaacctttccccccactccaaggtaagaaacccctgtagtatggaattcaacggttttattcaatgattgagccatgagatcctcctgtattgctattcattccattatatcataataaaaagaaggtcgaaaccttcttttttgttgatctttgcttacatcaagccagcaacgtgtgccaagacaccgattacaaagagggcgatgatgatagtgattggagatactttcttcttaagcaaccacatacaagcgaaagtaagaagcaatcccatcaaaccaggaatcaatgaatccaagttttgttggaaagttgtaactttttcaggtgtttgagatagacctgaaccaacttgagcgaaggcttcttggatacccttgtatccttcaggaagtttatcccagtggatataagctttgtcgtctaatttgacagaagaaacattgaagacgaatttaatagatacccaacgttctaccaagacagcgaggatgaacatcccaaggatagaagcccctttagtgatgtcttgcaagatcccaccagacatatctttggtaatttcagaacctgctttgtagccaagttcttgcgtgtaccacaagaaggccatacgaatcgcattccatgcgataaagaagatgagtgggccaaggatgttaccagacgcagcaagtgatgcaccaagagccccaagaattggacgtactgtaaaccagaagactggatctccgatacccgccaaaggacccatcataccaattttaaccccttggatagcagcatcgtcaatagcagcaccgtttgctctttcttcttcaagagcaagcgttaccccgatgataggagcggcaacgtatgggtgagtgttaaagaattccatgtgacgctcaagagcagccgcttggtcttctttctttgtgtagagttttttgatagctgggatcaatgagtatgcccaacccaagttttgcatccgttcatagttccaagaaccttgcaagaaggttgaacgccaccaaactttttgacgatctgatttagataattgtaatttttcagtcatgatagtgtcacacctttcttaatagtcttcgagaatgtcgccaattggatcgttagaagtagcggcaccgccacctccattgccacctttcttagaaagagtaaggtagatcaaggcaagggcaacaccaattgctccaagagcgatcaaagttaattggctaacggctgcaagagcaaaaccgatggcaaagaatggccatacttcacggctcgccatcatgttgataaccatggcataaccaacggctacaaccataccaccaccgatttgcattccatcagagagccattttggcatttgttcaagagcagttttgacagtttcagcaggaatcatcaacaagagggctgcaggaatggcgatacgaagaccttgaagaagaagggccacaaagtgagcgcgttctacacctttgatatccccttttctagcagcagcgtcggcagtgtgaaccaaaccaacggaaagggtacggacgatcatggtcaagaaaagaccagcaactgcaagtggaatagcgacaccttgagcgacagcgattccttttgtactgaagtctcccccaagtaccatgatgatggcagcagcgacagatgcaagggcagcatcgggtgcaactgcggcaccaatgtttgcccagccaagtgcaataaattgaagtgaaccaccaagcataatgccagcagtcaagttacctgttaccaaaccgattaaggtacaagcaacaaggggttggtggaattggaattggtcaaggataccttcaagacctgctaagaaggcaacaacgaccactaataccatagaaataatagacatgtttaaaatcctttcgtaagtaatcgattattgaacgttagctttgttaattaagtcaaacaaatctttcttagagtcatttggcactttacggacgtcaaattcaactccaagatcacgcattttttcaaatgtagccacatcatctttatccattgacaacacattgttaaccatggttttaccagttgagtgggccattgaaccaacgttcaaggttttaatcggaacaccaccttcgatggcgcgaagagcatcttgaggtgtttcaaataagatcaaagcatgggtatttccaaaacgtggatctttagcaacgtcgatcaatttttgaattgggacaacgtttgctttcacaccatttggtgccgcttgtttgatcaattccttacggagttcatctttggcaacagaatctgaagcaacaatgatccgatcggcttttgaatcaggtgtccaagcagttgcgacttgtccatgaagaagacgtgtatctaagcgggcaaggttaatcttgagttttccatctccgataaccgttccttctggaatagcagcttgggctacaggagcagcagcggcagtactagcttcttcaacaggattcaattcttctggaagggctttgacaccgtcttttgcttccttgatgatgtttgcagcgacttgatcaacgccggcatttgcatccatcaaacgttctgtataagcttgaatcaacatcggaaggttcaatcctgtgatgatcgcaaatttacgatctggattttctcccatgacgcgacttgcttggttaaatggagaaccactccaaaggtcagccaaaaccaagacttcatcttctgcatcaaatgcggcaacagctgcattaaatttagcatagagatcatccgggccttcacttggcatgaacgtaaccacttgaactttctcttgatccccaaagatcatcgagccggattggtggattccagctgcaaattcaccgtggctagcaataatgataccaatactcattattgacattcctccttataaaatttgtttgactttcagtttaagaaaactttaagctactttattataaatcgtttccacacttaagtcaatttttctatcaaaatctcgatgtaaaaacattgatttattatattaaatcatcgttagatagaaaaagaatgctcttgaatgaattttgtttattacttgttgatgcttaaaaaatcaataatagatatgttttataggattttgttctcaatgaaaagtttccgagaatcaaacgatattctcgaaaacaaaaataaatatataacaaattgtatatgagagtgattgagagcactcaaaaagactagcccagttgggctagtcctgtaggttcagttgtttagtttgtaaagtcaagtaccatacgtccttgaatggttccggcttccatttcgtcaaagactttgacagcatcttctactggacgtttttgaacgacagggactaccaagccttctgcaccaaattggaaggcttcttccaagtctttacgagttcctacaagagaaccaatgacttggataccatctaatacagttttcacaatgctgagatccatcatttcagaaggaagaccaactgcaaccacgcggccgcctgcacgaacagaatctactgcttggttgaaagctactttagaaacagctgttacgacagcagagtgagctccaccatttgttttttctttaatcaatcctgggacatcttcaacttcgcgaccgttgatgacaaagtctgcaccaacttctttcgccaattctagtttatcattgttgatatcgacagcgatgacatgtgcgttgaagactttcttagcatattgaacagccaagtttcctagtccaccagctccatagataacaatccattgtcctggttcagctttggcttctttgatggctttataagtggtaacacctgcacacgtaatagaagatgcttgggctggatctaatccttcaggtactttcactgcgtaatctgcagtaacgatacattgttcagccatccctccatcaacagagtaaccagcattttttacagtacggcaaagagtttcacgaccagttgtacagtattcacaagttccacatccttcgaagaaccatgcgacactgacacgatccccaacttttaggctcttgacatctggagcaacttctttaacaataccgattccttcgtgtccaagaacacggcctggaactttaccgaagtctccgtgagcaacgtgcaagtcagtgtggcagacaccacagtattcgatttgaacaagagcttcccctgtttcaagtggacgcatgtctttgtttgcaacgatttcaacaccagtaccttctggatttacaacaacagctttcattttgttcctccttaagtgaacgagaagcggtttaaaatttttgaaagcgcttctttaataactatgttaataatatcacaaaccagatgacgaggcaatgaaaaaaatggaaaaaaggggcggtattgattaaccgattaaggatttggcgcagaaaaagacatgaggggataactcatgtctgttagttttataagaataattgaatgagttggcgcgcgacaccatcttcattattcgtgaaatcagtgatggagtctgcataggggagaaggatggagctggcatttttcatggcgtatccataaccagcaagagctagcatctcagtatcattgtgctcatctccaaaggcaatcaaatccttctgatccatattgagtttatccagaaggtaggttagagcggatgctttggtcacattttttggattgcattccaaaatatttaagggaccaccccaagtattgatagacagattgtagtcataatgccgattcatttcatctgccagagcatatttgtcttccgctttcgtttgaaagaggatacagtttgggtcgctcgttacccgctcgggattgaattgattttctggttggaaagattcaataccgaataatttagggtctgcaacgtgctcatttggatcggtaataaagaatttattgcggtattcgcctgctataaagtccgcttggatggtatcccggttagcgaccatatctagcaggtattttttatctaaagtcaaacattgttcatccccccattttttctcaggtagatgcgtaagggagccgttaaaattgatcatcggagtatctagctctagttgtttgtaataggtatgtgccatacggtaggggcggcctgttgtaataatgactttatggccaagagcactaattttttttatcgtatcaatggtaaagtcgctcaatttgctttcggaatttaagagagtgccgtctagatctagagcgatcatctttttatgcatatttcagttcctttcgagaagaatgagaccattatatcagaaaaatcggaaaagcgctcaaaaatcgagaagagaagtaggatttcttgaaaggcgaaagatcttttggtaaaatagaaataacgttcgcaaattgattgggagcgagaatgatgaaaaaggagtttattctgaaatggataagttttttaaactttcagaacatggaaccactgttcgaacagaggttcttgctggtttgacaaccttttttgcgatgagttatatcctcttcgtaaaccctcaaatgttgtcacaaacaggtatgccagctcaaggagtcttccttgcaacgattattggatccgttgtcggaaccttgatgatggctttttatgccaatttaccttatgcacaagcacctgggatgggcttgaatgccttctttacctttaccgttgtatttggtatgggctactcatggcaggaagctttgggaatggtcttcatttgtggtgtgatctcattgattatcacattgacaaatgttcggaagatgatcatcgaatcgattccgaccgctcttcgctctgctatttcagctgggatcgggattttcttggcctatgttggaattaagaatgcgggatttttgaaattcacgattgaccctcatacctatacagtggttggagaaggagcagataaggcgaatgcaacgatctcagccaatgcatctgctgttcctggattggttgattttaacaatccggctgtcctcttggctcttgttggtcttgcgattactattttctttgttgtcaaagggattaagggagggattatcctttctatcttagcaacgactgtgcttggaattctcatccatgtggttgatatcactaaaatcgactttgcaagtaatcatctaggagctgcctttaatgatttaggcaagatctttggtcaagctttgggatcaaaaggattgggttctttgatttccaatacgtctcgtttgcctgagaccttaatggcaatcttagccttctccttgacggatatttttgatacaattggaactttaatcggtacgggtgaaaaagttgggattgttgcgacaaatggggaaaaccatcaatcagcgaaattagataaggccctctattcagaccttgtagcgacttcagtcggagctattgcaggaacttcaaacgtaacgacgtatgttgaatctgcagctggtattggagctggtggacgcactggtctgacagccttggttgtagcgatctgttttgctatttcaagtctctttagtccgttgttggcgattgtaccgaccgctgctacagctccaattttgattgttgttgggatcatgatgttgagtggcttgaaaaatatccattgggaagatatgtcagaagcagttcctgccttcttcacctctatctttatgggcttcagctactcgattactcaagggatcgctgctggatttatcacctatagcttagtgaaagtggttaaaggagaagccaaagaagtgcacagcatgatctggatcctagatgttctctttattttaaactacgttagcatggccttgaattaagcatcaagaaagtgccaaaaaggaatgggagttgtctcccattcctttttagttagatcgagggaatgaatgggagaatttcctgttttctttgattcctttttctcaaaaacaaaccggagtcgaacaatttctaaaagaaagagcagatttttaaaaagtttggtataatagagaaatgattagtcataatgaaacggagctgatcgctctaggaaaacagctaggaaaactcttagaaaagcaagacgtgattatcttatcaggtgatctaggagcaggaaaaacgacctttaccaaaggaattgcaaaggggttagggattgatcagatgattaaaagcccgacctataccattgttcgtgaatacgaaggccgcttgcctttataccatttggatgtttaccggattgggaatgatccagattctattgatttagatgatttcctatttggagatggtgctaccattattgaatggggagagctgattgagccgagtctctcggatgcttatctaaaaatttttatccgaaaattagaagatggtcgagagttagcttttgaagctcatggagcgcgtgcagaagctttactggcatcctttgagcaggtggaaaaaaccgatgactaaggaaaaggaagtgacagtagaaattcggcaagctgaaagtgcagacgcggctcttgtcgttgatttcttaaatcaagttgggaaagagtcagattacatgacgctagatgaagctggaattggcatgtctccagcagacatggagcaatttctaatggtgcaagaaatggcggaaaatcggatttgcctcttgctatttctagatcaggaactggcagctttgttaaatatcactgcagcttctcaacggtctgttcggcatattggtgatgtctttattgtggttcgaaaaacttattggaatcaaggacttggacagatcttgttggaagaaggaattgagtgggcgcactcgacgggtgttcttaggaaactagtcttgaatgtccaagtgcgcaatgaacgagcagttcacctgtataaaaagttaggttttgagatcgaaggttgtcaagctcgtggagcttgttcagctgaaggagaattcttagatgtttaccttatggggaaactgatagattagagagagattctaaatggttaaaaaaattattttgatgtttttgagcttattgacggtaacagtgattgggattggggcctatggccttaccatcctaaaccaaacgactgggactctcagtaagacctataaaggctttggaaatgagaccaatgtcattgcagaaaacaagccgatgactatccttttgatgggggttgatacaggtagcggttctcgggaagatccttgggccggcaatagtgataccatgattttggtgactgtcaatcctcaaacaaaagaaacaaccatgacgagcttggaaagagatatcctaaccaatattacttcagatggcgaaacggtccaagcaaaattgaattcggcttatgctcaaggtggtgccaagttagccattaagaccattcaagatcttttgaatatccatattgaccgctatgtcatgatcaatatgaagggattggttcaattagtggataaggttggtggtatcacggttaacaatccatttgacttcgatatctcgatcgaggaaaatgagccagaatatacggctaagatcgcaccaggacgtcaggagattaatggggaccaagctctcgtttattcacgcatgcgctaccaagacccagaaggagactatggacgtcaaaaacgccaacgtgaagtgatcaaaaagattgttgagaaagttttaagcctcaatagtttgagtcactacaaaggaatcattgagtctgttagtgacaatatgcaaaccaacatagcgcttgacagtaatagtcttcttcaattgctagggtataaagacgccctttcaacgattcatcagtaccagttgaaaggagaagatgccaccttagcagatggcggaagttatcagattgtcacttcaaaacatctcttgaaaattcaaaatatcatccgcaaagctttgggactaaaagaaatcaaaacattgaaaaccaatgcttacctattagatggagatgaagatttgaagtcttcttcttctcaaactgaaaatccagttccagcatctggggaagcacctgtttaccaagagtttaaccaactaccagttgtaccatcgacccaggatacgggagtggtgacgcctcaaagttctgttgcaccagtgacaccagttgctcctgcagctacagagtcgagcagtgtgacacctacggtgccttcagaataagaaaaaaacgattgagttttctcaatcgtttttacttggttgccagatgtcttgaatttcttttagagaagctgttgcttgttgactaaatagtttggtcttgtattggaaatccgttaccaattcttgaagattggtcttttggtcttggataatatccagattgcgttggatttttgctaggttatcttgaattcccttgaccaattggctggattcagtcacctctgttttaatttctttgcggttttttactaggtggtagctaatgctagctcctgttgcaaaccaaaagagatttttgagtttcatatggcctcctttttaactgtttttgatggtttctgcgagaactgctagttgttcaaaattaggctcgtgttcagtaaatgaaatggcaagctcatcttgatcggaatagcgagggataatgtggacatgtgtgtgaaatacggtttgtccagaaacttcttccatgttgctgatgatattcattcccttagcttgggtagcagcttctacttttttagcaactttagaaacacgtgcaaatagttgagctgtggcggtttcgtccatctctaagaggttgcgagcgtgtttttttggaaccactaacgtatgacctggtgtaacctgagagatgtccaaaaatgcgaggacttcctcgtcctcatagactttggaggaaggaatgtcgccagctataatcttacaaaaaatacaatcatcaaccataaatacacctcatttagactaaattttgttataatataagaacattataccagaaatcggagaaaatatgttagaaatcaacaagttgacagggggctatgtcaacatccctgtcctgaaagaggtgagtttttcagttccggatggccaactgattggtttgattggacttaatggagctgggaagtcaaccacgattaatgaaattattggtctcctgcatccttatgctggggaagtacggattgacggcttgagtcttccagaagctccaacagactatcgtaaaaaaatcggctatattccagaaacccctagcctatatgaagaattaaccttgagagagcatatcgaaaccgtagctatggcctatgatttagacatggatcaggtcatggtgcgcgtccagcctttgttggaacgatttcgtttggctgaaaaattagattggttcccgacccagttttcaaaagggatgaagcaaaaggtcatgattatttgcgcctatgcagtggatccaagtctttatattgtcgatgaaccctttttgggattggatcctgttgcgattgcagatttgattcagttattggcagatgagaaagcaaaaggaaaatcgattttgatgagtacccacgttctggattcggctgaaaagatgtgtgatggttttgtgatcctccataagggtcaggtccgagcaaaagggaccttggacgagctgcgttcaacttttggggatgagaaagcaagtctaaatgatatctacatgaccttgacagaagaggaaacagcatgaaagagttgatgaaaaaacggcaagaaacgtttcgaactcaatgtgtaaaatatagccgctatgttctcaatgatcatttcgttctctttatgttgattttcataggatttttggcggttcaatacagccaattcttgcaagatctacccaaagatacaagcctgatccgctggagtctcatgattggcttgctcctcttggttccgattggctccattgcgacctacttagagaagcccgatgctttattccttttggtaaaggaagaggaagtgaaacgttatgtcaaagggcaggccaagaagtcttttgtgttttggtttttgattcaaagttttgtccttctattatttgtgcctcttcttctggcaacagggctggataaacttgctattgtagcttatatccttgtcttaggggtggctaaaggggctgtttttagctggaaggaagcgcgtttctaccaggatgaaaatttaaattggcccttggctattgctcgtgagaatgcaaggaaacaattgattcttcgcttctttgccttgtttacaacggtgaaaggtattactaacagtgtcaaaagaagagcgtacttggatggtttcttagggcttcttcccaaaacacatggcaatacgtggctgcacttatatatgcgctccttcctacggaatggagatcttttctctatgactctacgactcttggctctttccattctcgctatcatctttattccccagcctctcgtagtgattgcccttgtagccttgctcaattacttggttatttttcaattactggggctttacagtgcttttgattaccaacccttgaccctccttttcccgatgaaaaagggcagtaaaaaggcagggttgaacaaaacgattcagctggtcatggggatgataacggtgatagaaggaggaattggcctggtctttatttcagataaagtcctgttgttaggcctactggcttatacagttgctttaatcctactctatcttccatttaagatggcgcgcttggttgacgaaagtcgttaaaattagtaaaatagattggaaactttttacggaggaaaagatggactcgaatgaaaaagagctaagcctcaccccaattcctgggaagagtgggaaggcctacatggggacctacccagatggtgggcgcgtttttgtaaaaatgaatacgaccccaatccttgcgggtctagcaaaagaacagattgctcctcaattgttatggagtcgacgcttgccagatggaaatgtgatgagtgcccaagaatggttgaatggggaaattctcacgccaaatgggatgtcgaaaaaacaagtcgtcaatattttaacgagattgcaccgttctagacctttgatgactcaattaaaaaaacttggctatcctgtggaatctccattagaattgctcaattcttggagtaaccggttgccaattgccctacgtcagaaccactatatccaatcagtcgtaaagaatttacgtaagacagtgcctgcctttcgggaggattatgcgacgatcgtccacggagatgttcgtcatagtaactggattgagacagagagcggcttgatttatctagtcgattgggactctgttcgtttgacagaccggatgttggatgtggcgcatatcttgagtcactatatcccagattctaattggcgcgattggttaggctattatggctacaagtacaatcaaaaagtatttgataaactctattggtttggtcaatactctttcttgtgccaaattgctaaatactatgaaaataatgatttagaaaatgtcaatcgcgagatctatgctctgcgcaatttccggttgaaatatggaaaggaaatatgagagttagaaatcgcaagggagcgactgaattattagaagcgaatccgcaatatgtggtcctaaatccagaagatgccaagggaaagtggcatgaaatttttgggaatgaccatcctattcatatcgaagtgggtagcggaaaaggggcctttattactggaatggccaaggccaatccagagatcaactacatcggaattgatattcaaaaatcggtcttgagttatgctttagataaggtcttagaagctgatgttcctaacattaaattgctttgggtagacggagatagcttgaccaactattttgaagatggggaaattgatcaactctatctgaatttttcagatccatggccaaagaaacgtcatgagaagcgtcgcttgacttacaagactttcttggataccttcaagcaaattcttccagaacatggggagattcactttaaaacagataatcgtggattgtttgaatatagcttggtgagtttttcgcaatacggtatgatcttgaaaggggtttggttagaccttcatgccagtgattttgagggcaatgtcatgacggaatatgagaagaagttctcaagtaaaggccaggtcatttaccgtgtagaagcacagttttagcatattccttgcaattattgtggaatcgtgttataataacttaaatgaatagaaaaggagaggcggggaaatatcttcgcctcttatctatgaggaggtggcaaccatcgcaacaattgttgacttagtaacagaagtgattcagccagctataaaggaaccatttgaattggtcgatgttgaatatggcaaaatgggtggtgactacgtcttaagcattttcgtagacaaaccagaaggaatcacactgaatgatacagcggatttgacagaaatcattagcccgctattggatcaaatcaaaccagacccatttccagaacagtacctcttagaggttaccagtcctggcctggagagaccattgaaaaccaaggaagcactcgagggagctgttggcaagtacgtcaatatcagcttgtacaaggctgttgaaaagcaaaaggtctttgaggggaatttggtaggttttgaagaggatgttttgaccattgagtatatggataaaacacggaagaaaacagtggatattccttataaccttgtgtccaaagcaaggttggctgtaaaattgtaacagaatgaaagaaaggatgcctttatagaagaggcaagaataacatgagtaaagaaatgctagaagccttccgcattttggaagaagacaaagggatcaaaaaagaagatatcatcgaagcagtcacagaatcattgcgttcagcttatcgccgtcgttatggacaatcagaaagtgcagcgattgaattcaatgaaaaaactggagatttccgtgtttatacggttcgtgaagtggtggatgaagtctttgatagccgtttagaaattagcttgaaggatgccttggccattagctctgcttatgagttgggggacaagatcaagtttgaagaagcgccagctgaatttggtcgtgtagcagctcaatctgccaaacaaaccatcatggaaaaaatgcgtaagcaaacgcgcaccatcacctataacacttataaagaacatgaaaatgaaatcatgagtggaacggtggagcgctttgacaatcgttttatctatgtcaatcttggctcaatcgaagctcaattgtctaagcaagaccaaattccaggagaagtgttccaatctcatgaccggattgaagtctttgtctacaaggtagaagataatccacgtggtgtcaatgtctttgttagccgaagccatcctgaaatgatcaaacgtttgatggaacaagaaattcctgaagtttatgatggaactgttgagattatgagtgtagcgcgtgaagctggagatcgtacaaaagttgcggttcgtagccataatccaaacgtagatgcgattgggactatcgttggtcgtggtggatcgaacattaaaaagattaccagcaagttccacccagctcgatacgatcaaaaattagaccgtatggttccgacagaagaaaacatcgatgtcatcgagtgggttccagatccagctgaatttatctacaatgcgatcgctcctgcagaagtggaccaagttatttttgatgatgaagatagcaaacatgctctcgttgtggttccagacaacaaattatctcttgctattggtcgtcgtggtcaaaacgttcgtttggcggctcatttgactggttaccgcatcgatatcaaatctgcaagtgagttcgaagaaatggaagcagctcaagaaacttttgaagaccaagtagaaagtggcgaagagcaagtagactaagtgagggagggaaaatggtaaaaacaagaaaaatccctttaagaaaatctgtcgtttcaaatgaaattattgataagcgcgatttgctccgcattgtcaaaaataaagaaggacaagtctttatcgatccaactggcaaggccaatggtcgaggtgcttacatcaagctagacaatgaagaagcggcacttgctaagaaaaagaaagtttttaatcgtagctttaatatggaagtggaagaagctttctatgatgaattgatcgcttatgtagatcataaggtgaagagaagagagttaggccttgaataagcaaaagataagtaatttgttgggcttggcgcaaagagcaggaaaactcatttctggagaagaactcgtgatcaaagcaatccaggaagaaaaagcaaaattagtttttctggcaaatgatgcagctagtaacctgacaaaaaaggtgacggataagggtcactattatgaggttcaagtatctaccgtgttttcaacactagaattaagcactgcaattggacgtgcccgtaaggtcgtcgctgttgtagatgctggattttcaaagaaaatgaggtctcttatggaatagaagaggaggacagcaattgtctaagaaaagattatacgaaattgccaaagaattgggcaaggaaagtaaggaagtcgtcactcgtgcgaaagaattaggttttgacgtcaagagtcatgcatctagtgtcgatactgatgttgctgaaaagttgatcaagagctttgcagcgaaaaaagaaacagtcgaaaagaaagtagcagaagtggctgccaagacaacggctgtcgcagcgaaaaaagaagcagcgcccgtcaaaaaagaaggagcaactgagacaaaatcagtaacgccagctgctaaaccaaagagtcgtaactttaaagcggaacgagaagcgcgtgcaaaagaacaggctgaacgtagaaaacaacaaggcaatcgtccaaaacgtgatcgcaaagacaatcagcgttatggtgacaaccgaaatcaacgaccacaagagcgaaatgaacaacgaaatcaaggttctgagcgtcgcaataaccgaccagatcaaagacgtagtgcacaaccccaagtagcaccaaaagttgatttcaaagcgcgtgcagcagcactgaaagctgaacaaaatgctgagtacgcacgtggaagtgaagatcgctacaaacaacaagctgcaaaagcagaacaagaacgtcaacagcgccggaaacgggtagaagcaccagaagtgaaagcacctgtacaggagccagctgttgagaaccatacaaaaccagctgttgctgctgctccagctcaagtcgatacacgtcggaagaaacaagcgcgaccagataagaaacgcgatgattttgatcgtgaagaagatggtccaagaaaacaacaaaggaatcgaaatagtcaaaatcaagtgagaaatcagagaaatagtaactggaataacaataagaaaaataaaaaaggaaagaacaaccgtaatgatgctccaaaaccagtaacagagcgtaaattccatgaattaccaagtgaatttgagtatacggatggaatgacggttgccgaaatcgcaaaacgcatcaagcgtgaaccggctgaaatcgtcaagaagctctttatgatgggagtcatggcgactcaaaaccaatcgctggatggagatacgattgagctcttgatggtggattatggaattgaagccaagaaaaaggttgaagtggacaatgccgatatcgaacgcttcttcgttgaagatggttatttgaatccagatgagttggtagagcgtccaccagttgtcaccatcatgggacacgttgaccacgggaagacaacccttttggatacccttcgtaattcacgtgtagcaacaggtgaagcgggaggaatcacccagcacatcggtgcctaccaaatcgtggaaaatggcaagaagattaccttcttggatacacctggacacgcggcctttacttctatgcgggcgcgtggtgcatctgttacggatattaccatcttggtcgtagcagcggatgacggggtgatgccacagactatcgaagccatcaaccactcaaaagcggctaatgttccaatcattgtggctattaacaagattgataaaccaggagctaatccagagcgtgtcatcggtgaattggcagagcatggagttatgtcaacagcttggggtggtgattctgagtttgtagaaatctcagctaagttcaaccaaaatatcgatgaactcttggaaacggtccttcttgtggctgaaatccaagaacttaaagcagatccaactgttcgtgccatcggtactgttatcgaagcgcgcttggataaaggaaaaggtgctgtagcaaccctccttgttcaacaaggtaccttgaatgtccaagacccaatcgttgtcggaaatacctttggacgtgtccgtgccatgaccaatgaccttggacgtcgtgtgaaggttgcaggaccatctactccggtttctatcactggtttgaacgaagcgccaatggcaggtgaccacttcgcggtttatgaagatgaaaaatcagcgcgtgcagctggtgaagaacgtgccaaacgtgctctgatgaaacaacgtcaagcaaccaaccgcgtcagccttgaaaatctctttgataccttgaaggctggggaagtgaaatctgttaatgtcatcattaaagccgatgtacaaggttcggttgaagctctttctgcttcccttcaaaagattgaagtagaaggtgtgaaagtgaccatcgttcactcagcagttggtgcgatcaacgaatcagacgtgacccttgcagaagcttcaaatgccttcatcatcggatttaacgtccgtcctactccacaagcacgtcaacaagctgaagctgacgaggtggaaatccgtcttcactcaattatctacaaagtgattgaagaaatggaagatgccatgaagggtatgttggatcctgagttcgaagagaaagtcatcggggaagcagttattcgtgaaacctttaaagtctctaaagttggtactatcggaggatttatggtccttagtggtaaggttacacgtgattccaaagttcgtgtcattcgtgacggtgtcgtgatctatgatggtgctcttgcaagcttgaaacacttcaaagatgatgtcaaagagatcacaaatggtcgtgaaggtggattgatgattgaaggttacaatgatatcaagactgatgataccatcgaagcctacatcatggaagaaattaaaaaataagcaagctgactaggaaaaaagagggttctcctctgatttcctagtttttaaacacaaagcagaaaggagttcctatggcaagtcattttcggacagatcgagtagggatggaaatcaagcgtgaagtcaatgagattttacaaaagaaagtccgtgacccgcgtgttcaaggcgttactattacggatgttcaaatgctaggtgatttgtctatggccaaagtgtattattcaattatgagtgatttggcttcagacaatcaaaaggctcagacaggccttgaaaaagcaacaggaaccatcaagcgtgaattaggtcggaatttgaaactgtacaagattccggatcttacttttgtcaaagacgagtctatcgaatacggaaataagatcgatgagatgttgcgcaatttgaacaaagactagagaggttggaaattttccacgcccagattgaaagataaagtcttcttagaaactttccttaggtgagtacggacgtcagcgaacttcttcgaagttccatgactaattattgagcctaaggtctcaataattccgagtacctgaaactattaagtttcaggtacttttctcacgacgaaaagtttcagtagatgattgaatcactctaacgagtaacatttctttttatagaatttattagatttataaaaaagaatagtttgtctacagtctcgggttggaaatttccaactttttttgactcttaaaatgaggaaaataaaacagaaagaaaaaaacggtttcaaaaaataatagaaatttacagaaatctcttgtgtgattggaaattatcctttacaataggagaggagttttatttctgatctcaaatttggaggaatgaacatgtcgattaactggcaggaaattgtatttaactttttgggaggcctggggctctttctctatagtattaaaaccatgggagaaggcttgcaacaggctgcaggagatcgacttcgatactatattgataaatatacgagtaatccctttctaggggttctagtagggattgggatgactgccttgattcagtcgagttcaggggttacagtgattacggtcggtctggtgagtgcaggacttctaaccctccgtcaagctattggtattgttatgggggccaatattggaacgactattacctcctttatcattggttttaaattaggagactacgctcttcccatgctctttatcggagcggtttgtctcttctttaccaaaaatcgtttggttaataatgttggacgaatcgtttttggtgtcggtggtatcttctttgccctcaacttgatgagtggggctatggaacctcttaaagatttgcaagtctttcgtgactatatggtgcagttaagtaaaagtcctatcttgggtgtctttgttggatcaggcttaacacttttgattcaggcctcttctgcaaccattggtatcttgcaaaatctctatgctagtcatttgattgacctgaaaggagccctcccagttctctttggtgataatatcggaacgaccattacagctatcattgcttccttgggagctaatattgcggccaaacgtgtggcaggtgcccatgtagcctttaatgttatcggaaccattatctgtcttgtcttccttgttccgtttacctctttgattcaatggtttgaaacgactcttcatttatccccagaaatgaccatagcctttgctcacggaacctttaatataaccaataccatcatccagttcccattcattggagctttggcatactttgtgaccaagctgattcctggtgaggatgaggttgtcaaatatgaaccgctctacttggatgaaaacttgatcacccaagcgccttcgattgctcttggaaatgcgaaaaaagagttgcttcatttaggtggatatgcagacaaagcttttaatctttcttatgattatattgttcatcaaaatgagaaaacagctgaaaagggtcataagacagaagaagccatcaataccattgatgatgatttgactcgctacctgattcgtttgtcaagtgaagccttgagtccgagagaaagtgaagttctcaccaatatcttggattcttcacgggatttggagcggattggagatcacgcggaagccttgatcaatctgaccgattatttaattcgtaagaaagtggtcttttcagaagcggccttggctgaattggaagatatttacaaccaaacccatcaatttgtagaggatgccttaaaagctgttgagaacaatgatgtgagtcttgcaaaccaattggtagcacgtcacgaggcaattgaaaagttggagaaaagacttcggaaaacccatattcgtcgtttgaaccaaggcgaatgtacacctcaagccggagtaaactttattgatatcatttctcactatacacgtgttgcagaccatgccatgaatctcgctgaaaaagtacaaatcgagcaaatttaaggaacgtcaaacagagtaagtaggaagcttactctgttttttgttggattctattcaaaaataggtctagaccatttacaaatggaagtgaaagcgttataatatgtatgaatataaatggaacacagttcctacaatggaaaggacgattttatgtctacatatattaaagcagatcaattttattatccacatggggttcgccgcggaggctatttggagcttgttgatggcaagtttggaaaacatgtggaaagcttaccagaaggtgcggatgtgctggattattctggttacagcattgcgcctggcctcgtagatacccatattcacggatttggtggggtagatgtgatggataataatatcgaaggcactctccataccatgagtgaagggctcttgagtacaggggttacgagctttttgcctacgaccttgacttcctcttacgaacaacttttggcagtaactgaaaatatcggtgcacgatacaaagaagcaacaggagctaagattcgcgggatttattttgaaggcccttattttacagaaaaatacaagggagctcaaaacccatcttatatgaaggatccaagtatggaagaattccgggcttggcaaaaagctgccaatggtctgttgaataagattgcccttgctcccgagcgtgaaggggtggaagaatttgttcggaccattacaggagaaggagtgactgtcgctctgggacactccaatgctacttttgaagaagctaaaaaagcggttgatgcaggtgcgagtgtctgggtacatgcctacaatggtatgcgtggtttgacgcaccgtgaactcggtatggttggtgccatgtatgagttgcctcatactacagcagagttgatctgtgatggccatcacgtggatccactagcgtgtgatatcctgatgaaacaaaaaggcaaagaaaatgttgccttgattacggactgtatgacagctgggggcttagaagacggggactacatgcttggggaattcccagtcgtggttgctgaagggactgctcgcttgaaatcaactggtaatctagctggctcaatcttgaaattgaaagatggattaaaaaatgttgtagagtgggggattgctaaccctcacgaagcagtgatgatggccagcctcaatccggcaaaatcagtccatattgatgatgtttgtggtcaaattcgagaaggatatgatgcggacttcatcgttcttgatcaaaatttggatctggttgcgacctatctcgatggggtcaaacgttaccaggctacgaactagattcaagaattaaagatagaatacttcctctctaagtcatacctagagaggtttttgtttaccgatggtagtgcaattttgtgaatgctgtcttttcatgctataatgggaattgaaatgtgaggtagcttatgaaggcaattgatatacgttttttattgatgggaatttttttcttgctctatgggattgtaagaaaaaatatctttattgtgattgttggtggggcatttttactctatagtttttatagcaagaagatggagccaaccaagaagaatatttttaagccagagctcaagcttcgagggcctaagaaaccgaaatcgaagaaaggaaagaaaaaatgaacaattatcgtttaaataatggggtggagattcctgtattaggatttggaacctggaaagcagcagatggagaagaagcctatcaagctgtcttagctgctttaaaagcaggttaccgccatatcgatacagctgcgatttatcagaatgaagagagtgtgggtcgggccattaaagacagtggtcttgcgcgcgaagacctgtttattaccaccaaactttggaatactcatcacacctatgaagacgctcaagctgctttggaagagtctcttgagaaactaggcttggactatgtagatctttatttgattcattggccaaatccaaaacctcttcgagaaaatgatgcttggaaacaacgaaatgctgaggtttggcgggcaatggaagatatgctagctgctggcaaggttcgagctattggtattagcaattttctgcctcatcatttggaagccctccttgaaacagctcgggtcattccgtctgtgaaccaaattcgtctagcacctggggtttaccaaagcgaagccattgcagcgagtcgcaagcatggcattttattagaggcttggggaccttttggccaaggagaattgttccaaaatgaacaagtaaaagaaatggctactaaatatggaaagaccgttgctcaactagccctggcttggagtttgcaagaaggtttccttccattgcccaaatcggttacgcctgagcggattgcgagtaatttaaattgctttgattttgaattgacggcagatgatgtggaactccttcgtcatcttccggttgaagcaggtgcaccagatccagacaccaaagatttttaaaagagaatttctattcattaatgaaaaccgaggacagtttcgttctcggtttttaaaatcctttcaacgattaaataattttaaaaatccaataaaaacagatgttctataatactttcccatgtaacttcaaaattttccgaacgaaaattagttaatagttagtaatattcgtaaatgttacatttgtgttacaatttgttttttgaatgaattttcagataattttgcgttataatagttactattaaaataaaaggggagtttctatgaatagacaagaacgtttttcattaagaaaatacaaatttggtgtagcctcagttttattaggggctgttttggtatttggatctgcacaagcgagtgcagaagaacaagcggccagccaaacgagtgctggaacacagcttgtagccactactcaacaggcacctgctgaagaagagcattcacaagcaacagaagcaagtacagcagttgctagtgagaaagtagaagttgcaaaagaagcaacagttgctgaaaagacaacgaatacaacagaagcagctcatgttgaaaaaacagaagctccgaaagaggcagctgttgttccagaaacaaaaccggaagtagcgaaaaaacctgtagaaaaagcaacagaagtggctactgcgacaaattcagaaacaacgaatcgtcatgaggcagctgaaaaacctcaaagcatcgaaagtgacgaaattatcactgttccccaaacctggaagcaaggctataaaggggaagggatggttgtcgccgtcatcgactctggcttggatgtgaaccacgaggttcttcggattaccgatccttcaaaagctaagtttaaaaaccaagaagaaatcgaagctgctaagaaagcggcaggaatcgattatggtaaatggtacaacgacaaggttatctacgcttatgactactttgatgggaccgacaatatcaaagaggccgaaagagattctcacgggatgcacgttacagggattgcgacagggaatcctgataaagcagcaggaaacggagaaaagatctatggtgtagcaccagaagcgcaagttatgtttatgcgtgtcttttcagatcgtcaaaaaacaacaggatctgctctttatgtaaaagcaattgatgatgctgtagctcttggtgcagatactatcaacatgagtcttggctctacgactggttctacggtcaatgcggattcagatattgtagatgccattaaacgagcgcgcgctaaaggcgtatctgtcttaatttctgcaggaaatagcaatagctttggaaatggttactcaagaccttctgctgaaaatccagattatggtttggtcggaaacccatcaacggtagaggactccatctctgttgcttctatcaataataatgttattacgacagaagtatttgaggtgaaaggtctagaaggcaatgcggaagcggataacggtaagtttgattacagtaaatctgctgcagatgctgattttgaaaaaggcaaagagtacgaatatgtatccgttggtcttgggaaagaagatgatttcaaagatctagaccttaccggtaaattagctttaatccaacgtggggaaattcccttctcagaaaagattgcgaatgccttccatcatggagcagcaggagctttggtctacaataatgtggaaggatctaaccttggaatggcaattgaaggagatgcgaaaaagatcccatctgtctttatttcaaaacgctatggggaagctcttaaggcaggttcctacaaaattgtctttaacaatactatggccaaccgtccatctccagaggcagatcaattatctgatttctcaagctggggagtgacaacagatggtcagttgaaaccagatgtcacagcacctggtgggaatatcttctcttctttaaatgacaatacctacggggatatgagtggtactagtatggcctcacctcacgtagctggtgttgcagccttggttaaagaataccttgtgaagaaccatccagaattgactcctgaacaagtttctgcaactgtgaaagccttgattatgtctacggctaaaccacatgttaacaaagaaaccggtgtctatacgtctccacgccaacaaggagcaggggttgtagacacagccgcagccgtttcaacagacttgtatgtgactggtgaaaacaactatccaagcgttactcttggtaatgttggagatagctttacctttgatgtcacagtccacaatatttcagataccgatcgtaccttgaaaatgttggtgaatactgacacagatgaagtgaaggatggtaaatttaccctacgtccacgtaaattaacagaaactgcttggcctgaagtaaccgtgaaagcacatagttctgaaacagttacagtgaaagtcgacacaagtaaattcacagaagaattaagcaaagaaatgccaaatggctatttccttgaaggatttgttcgttttgtcgatccagcagatgatggggatgtagttagcttaccatttatgggattcaagggagaattccaaaaccttccagcggttgaaaaaccaatctatgatttagttcgtgaaggaaaagatggcttctactatcatgttccaaaagatttgaatatctcatcgagtgcgaatgtttctgcgctcgtcacccttcaaaatgaccttctccttacacaagggaaacgtgatggtcgtcggattaccgttcttggtattgaagaaaatgcggaaggaactcactctcttcaactagatgagaatggaaatgttcgcattgccatttcaccaaatgaagatggaaataaagacctcgttgaatacaagacggttgctcttcgaaacattgaaaaccttcatgcaactgtctacgcagcaagcgatacggaacataaaaatccgctgtgggaaggaactccatctgatcatcgtaagaacttctttgatggtaatgaaaagaacccacgcagttacacactagataatactgcttggaatggtaccgatgcaaatgggaaagcagtagcagatggtgtatatgattatgtcattcgttacacaccaatggttcctggagctgaggagcagtcaacgaccttcaaggttcaagtcgatactcaaaaaccagtgatcacatctggatatatccgtttcaaagatggggctcaacagtttgtagcacgtaaagccaaagatgttggcgatggtggtatcttaactgaaaaactcgtctacgtgactccattcgatgatcaggggacaatggtccaaaccagtgaagataagaatggtacacgtgcgcttgaaaattaccatgtgatcaaggccaatgaagatggtagcttcgatcttcctgaaaacatcgataagaagaatatctactactatgtagaagactttgcggggaacgtagactatgtttcactagctgatttagttcgggatcaaaatagtggtcgggttcaaattgcagttcgtgacgctaaaacgaacaaagatttggatactatgtatgtttaccgaatcaaagatagcaacggccaatacgtgtcagttgataagacaaaagatattaacttcttgaactttggtcattatactgcagaaatctttacgtatgatcgtacagaagtgaaatttgtcagcagcttgacgcaagaatttgatttgacagaggataatagtttccaaacgattacttttcttgccaatactttagaatatgcaccagttagcatcagatttgatcaaccggtttcaaaagcagctacgatcgtattaaaaggggcagatggtgaaaactttgtcttgcctgctgaaaaatatggtaaaaatggctttggtaaatctgtagcaactggtcaatataccttggttgcaactcttcctacaggttatgaactagctgaggaagcaccagtgatctcagttgtcgcagggcgtaacaataattatcgtattggagtgatctcaaaagtggatctcttagccgctttgaacaaccaagcagatgttacaaagacagcgcaatacttcaatgccagtgcggataagaaggaagcctatgatcaagccttccaagctgcccaagcagccttgaccaacaaggttagtcaagagcaagtcaaccaagctctagctagtcttgaagctgccagccaagctttgaatgggaaagattcaaacgttgcggccttgaaagaagcgatgcaggcttacgatgctacgactaaaactggtcgttatgccaatgccaaagaaaaagtacgtcgcgactacgatcgtgctttccaaacagttgccttgcttgcagttgatccaactgtgaaacaagaacaaatcaatcaagcacttgctgagcttagccgtgcagaaggaaaattaaacgggaaagcaactgatttttcaagtcttgaaaaatacatcaaggaagaattgaagttccaagaaaagaatgctaaattcatctatgctggaaatgaagaaaaagaagcttacctagtagccttcaaggatgcacaaactatcctttcaaatccaggagcaagccaacaagatgtgaaagatgctttgacagccttgaagaatgccaagaaaaaacttcatggtaaaaaaccaaaagctgcaagacgtccataagaaaaacaacattgtttgttagcctaaaatccgtatgaaacgattgtttcatgcggattttaatttacaagtcactaaaaatctgctataatactagtcaagaaagaagggcttatggcgtttttctagcgagcttgggatagtgagagccaagtagagcaaagtaagcaagtggcgctttctctcagtaaaaagctgagtaaagtaagataaaatgaagtaataaattagggtggaaccgcgtttctgacgcccctaggtcacagacttaggagcgaagacacggttctttttgtatcctgagtcacaagaaactttatgaaaaaggagtatgcaatgtctaaaaaactaacctttcactgcgttagtggcagagacctccatacagtcggactgccccacgctcagcactagggtgcctgagctaaacgcagtactaactcgtcttgcctcgtatgatcgacgaggcagactcgtgtcgcaagaaatcatttaaatcaaggagtatttaatgtctaagaaattaacatttcaagaaattattttgactttgcaacaatactggaatgaccagggttgtatgctgatgcaggcttatgataatgaaaaaggtgcgggaacaatgagtccatatactttcctccgtgccattggtcctgagccatggaatgcggcttatgtagagccatctcgtcgtccagcggacggtcgttacggggaaaacccaaaccgtctttaccaacaccaccaattccaagtggtcatgaaaccatcaccatcaaacatccaagaactctaccttgagtcattggaaaaattggggatcaatcctttggagcacgatatccgtttcgttgaagataactgggaaaacccatcgactggttcagctggtctaggttgggaagtttggcttgacggtatggaaatcactcagttcacctacttccaacaagttggtggattggcaactggtccggtaacttctgaggtcacttacggattggaacgtttggcttcttacatccaagaagtcgattctgtttacgatattgagtgggctccaggcgttaaatacggagaaatcttccttcaaccagaatatgaacactcaaaatacagctttgaagtttctgaccaagatatgcttcttgaaaacttcgaaaaatttgaaaaagaagcaggacgtgctttggaattgggccttgttcacccagcctatgactacgttttgaaatgttcacacaccttcaacttgcttgatgcacgtggagctgtatccgttacagaacgtgccggctatattgcccgcatccgtaacttggctcgtgtcgtagccaaaaccttcgtcgcagaacgtaaaaaacttggttacccacttctcgacgaagccacacgcgccaaactcctagcagaagaggaagaataaaaagagttacaagaatggaaaatgggcaaacaaagtgagcccatatggaacccagaggcaagtcggagacttgctaaagggataggcaccgccgtactgctatatggggatttttgaaacgtgaggttcaaaaatcagttggctaaatccactttgatgagaccgttggaaatcgatgtcaagaagacagaagatttccctacagcctcacaaagttagttagcgacgtccccggtacctaaggtgcctatcaaaaagaagaattttgtaaaggaaaaaacatgacaaaaaacttattagtagaacttggacttgaagagttaccagcctacgttgtcacaccaagtgaaaaacaactcggtgaaaaaatggcagccttcttggatgacaaccgactttcatacgaagacattcaaaccttctcaacaccacgccgtttggctgtccgtgtgattggtttagcagatcaacaatcggatttgactgaagattttaaaggaccttctaagaaaatcgccttggatgcagatggaaacttctcaaaagcggctcaaggattcgtccgtggaaaaggcttgaccgttgatgatatcgaattccgtgaagtcaaaggggaagagtacgtttatgtcacgaaacacgaagctggaaaaccagccaaagaagtcttggctggccttccagaagtgcttgcttcattgaccttccctgttagcatgcactgggctaacaatacatttgaatacatccgcccagttcacaccttgatcgttcttttgggcgacgaagcgctcgaccttgatttcttggatatccagtcaggtcgtgtgagccgtggacaccgtttccttggacatgaagtggaaatcaccaatgcggattcgtatgaagaagaccttcgtaccgtttacgtgattgcggatagcaaagaacgtgaaaacatgattcgtgagcaaatcaaagccatcgaagcagaacaaggtgttcaagttcaaatcgaagaaggccttttgaatgaagtcttgaacttggtcgaatacccaactgcctttatgggaagttttgatactaagtatttggatgttccagaagaagttttggtgacctcaatggaaacgcaccaacgttactttgttgtacgtgacctggatggtcagctgaaaccaaacttcatctccgtccgtaatgggaacgctgagcacttggaaaatgttatccgaggaaatgaaaaagtcttggtggcacgtcttgaagacggtgaattcttctggcgtgaagaccaaaaacttaagattgaagacctcgttgctaaattggcgaacgtaaccttccatgaaaaaattggttctctttcagaacacatggctcgtgcgggtgtcattgcagcggcactagctgagcaagctggtttgactgctgaagaaacggcagctgtcgctcgtgcagctgaaatctacaaatttgacctcttgacgggtatggtcggagagttcgatgaattgcaaggaatcatgggtgaaaaatacgcccttctcactggtgaagatgctgcggtagcgacagctatccgtgagcactaccttcctgattcagcagacggagcccttccagagactaaggttggtgccatccttgcccttgcagataaattggataccctcctttccttcttctcagtaggcttgattccatcaggttccaatgacccttatgcgcttcgtcgtgcaacacaagggattgtccgtatcttggatgcctttggctggcatatccctatggatgagttgattgacagcctttacgctctttcatttgatagcctttcttatgataatcaagcagaagtgctcaacttcatcaaggcgcgtgtggacaagatgatgggacgcacagcaaaagatatcaaagacgctgttcttgctggttcaaactttgtcgtggcagatatgttggaagtagctgaagctctctcagaagctgcgaagaccgatggttataaggcggctgttgagtccctctctcgtgcctttaacttggcagaaaaagcagatgcttcagtagcggtcgatgccagtctctttgaaaatgatcaagaaaaagcccttgctaaagcaattgaagagcttgaattgactggtgcagctagtgacaaattgactcaactctttgctcttagcccagtcattgatgccttctttgacaatactatggtgatggcagaagatgaggcggttaaaaacaaccgtttggcccttcttgcaggccttgtagcgaaagctaacgctgttgcagccttcaaccaattgaacacaaaataagtacctgatgacaggtagaaagtaggttttattatgacacctgaaaaaatcgctcggatcaatgagcttgctaaaaagaaaaaaacagaaggtttgactcctgaagaagcagtggaacaagcaaaactacgtgaagaatacattgaaggttatcgtcgttcggttcgtcaccacatcgaagggatcaaaattgtggatgaagaaggtaacgatgtaacacctgagaaactacgccaagtgcaacgtgaaaaaggtttgcatggccgtagtctcgatgaccctaattcataagcaaaagagtgctggaagagatttcagcactctttttaatctataaaattcagaatattctggactggattgaccaatttttaaaaacatggtatagtagattgtatgaaaatttgaagtatacttttctgaaaatgtacagaaaaagaattggagtaattatatgtcaaaaaaacatcatactggtgaagaaaccgaaaatgggatggttcgtggtctgcaaaatcggcatgttcagctgatcgctattgcaggaaccatcgggacaggactctttcttggagccggtcgttccctttctttgacagggccctctattattttagtctatatgctgactggcgccttcatgtacttgatgatgcgggcaatcggagaaatgctctatatggaccctgatcaacacacctttatcaattttatcaccaagtatataggaaaaggttggggttatttttcaggatggtcctattgggtctccttggtatttttgggaatggcagagatcaccgctgtttccaactatgtccagctttggtttccaaattggccagcctggcagattcaaattatctttttagcgctcttaagttgtgtaaacttgatcgctgtgaaggtttttggagaggttgaattctggtttggaatgatcaagattgtcactattttagccttgatcgcaacagggatctttatggtgacgacgaactttgaaacaccagctggacacgctagcttaaccaatattaccaatggttttcaaatgtttccaaatggttgggtcaagttcgtcatggccttccaaatggtcttctttgcttatcaagcgatcgagtttgttggaatcactacttctgaaacagctaatccccgccaagtattgccaaaagctattaaagaaattccaatccgaattgtgattttttatgtaggggctttgttggcgattatggctattttcccttggcaacagcttcctgtcaataaatcaccgtttgtaacagtctttcagatggtaggaatcaagtgggcagcaggattgattaattttgtcgtactgacagctgctgcatcttccttgaattccaccctctattcaacagggcgtcacttgtaccagattgcaaaagaaacaccaaacagcaaagtgatgaatcgtttgaaactgaatagcttatctcgtatggggattccaagtcgcgcgattattttttctgcgattgtggttgctgtttcagcctttatcaatgtcttgccaggtgtctcagatgcctttgccttgattacggcatcttcttctggtgtctacattgctatttacattttgactatgcttgcccatcttaagtaccgtaaatcgaaagaatttatgccagatggttttgtcatgccagcctataaagtgttgaatccattaaccattgttttcttcctctttgtattcgtttgtctcttcttgcaagaatcaacatacattggagcgattggagcaaccatctggatcattctttttgggatttacagcaattggaaacataatcaataaaccgcaagagagtgggacagaaatcggtaattcgttagaattcgatttcgtcgtcccacctccgcacagttgagtagggctgtaaaagctgatgaaatcagcgtagtagagcccactcaaccactgcgtcttgctcgacaatccaaaaataattgagaggctaggacttttgtcccagcctctttattatttcagagctagtttcctttttataagaaatttcttgggggattagaaaaaaacagagatggaagaaattatttttcttccatctctgttttttgtttttgaatggtttttttgagccaccaaagtgagccaactaggatcagggcagcaagccaaaaaatccaagcttcaatagtggttagaaaaaagtagagagcgatagcatcgaccaataaaagtgggatgagaatctgttttcttattttcataagaatattgtatcataaatcctagaggaaacaagtgaaatcaagcctttctaggtattttgtaggttccgaaaaggtccgataggattagttagtgaattttctttcaggagtgcatcttggtcccatttgtggtaaaatagtaaagatatgagtaaagaatttcatcatgtaacggttttgcttcatgaaacgatcgatatgctggatgttaagccagatgggatctatgtagacgccacattgggtggggcaggccacagcgaatatttgttaacaaaattaaatgaatcgggccatctttatgcctttgaccaagatcagcatgcaattgagaatgctaagattcgtttagctccattcatcgagaaaggcatggtgaccttcattaaggataactttcgtcatttgaaggaacgtctaaacgaattgggtgtgactgaaattgatggaatctgttatgacctaggtgtctctagtcctcagttagatgaacgggaacgcggattttcttacaagaaagatgcgccactggacatgcggatgaatcaagaagcttccttgacagcctatgaggtcgtaaatagctacgattaccatgatctagtccgtatttttttcaaatatggagaggacaaattttccaagcaaattgcgcggaaaattgagcaggcacgagcaattaaaccgattgaaacaacgactgaattagcagagattattaaatctgctaaaccagctaaggagctcaagaaaaagggtcatcctgctaaacagattttccaagctattcgtattgaagtcaatgatgaattgggagctgcagatgaatcgattcaacaagccatggatttgttggccctcgatggtcgtatttctgtgattacctttcattcgttagaggatcgattgaccaaacaattgtttaaagaagcttcgacggttgaggttccaaaggggcttccctttattccagatgatttgaaaccaaagatggagttagtcaaccggaaacctattttgccaagtgaagaagagcttgaggaaaataatcgatctcattcagcaaaattacgggttgctcgaaaaatacacaagtaagaggaattgatatggcagcaagatatgagagaacaagaacacaggtattgcaagaccactttcgccgtttctctagagtagaaaaggctttttatgggtcgattgtcctaacagctgtgattttagccattagtattgtctttatgcagacacggattttacaagttcaaagtgaactgactgatttgaatacggaactagaagccaaaaagacggaattggcagatgttcgtcaagaggtcaatgaattaacacgttatgaccgcttatcacagttggctagctcccaaggaatgaagctgcaaaaagaaaatcgaaaaacagtgagtgcaagtagtgatgaataaattcaaaaaatttttgatcgggtattcgataaagaaacgtcgcttgccggatcagaatcgaaaacaagttgggaaaaatctcagtgtactggcgattttcctcttttttctctttctgattaattttgcaatgatcattgggactgacaaaaaatttggtgtgaccttatcggatcaagccaagaaagtccatgagcagacggtcattgttcctgcaaaacgtggaacgatctatgatcgaaatggagcagtaattgctgaagatgcgacgacctataatgtttatgccattattgataaaaagtacaaatcagcaaccgggaaaatcctctatgtagaagagagccaatttaaaaaagtagcagaaatctttaagcagtacttagggatggatgaggattacgtcattcaacagttgtcgcaaaagaaattgaaacaggtttcttttggctcgaacggaaacggcataacttatagcaatatgacggccatccgtgaggccatggaagcggcgaagattgaaggggttgcttttacaaccagtccaaatcgaagctataaaaatggagtttttgcttctcaatttataggtcaggcctctcttcaagaagataaagaggggaataaaactctgaaggggcaatcagggatggagaaatccctcgatcgtattctcgctggtcaaaatggggttatcacctatgacaaagaccgaaacggcaatatcgttcctggttcagataaggtttctgtcaaaacagaagatggaaaagatgtctatacgaccatttcagcagaattacagacctaccttgagacacgtatggatgttttccaagaaaaagtaaaaggaaagtatgttagtgcgactcttgtgagtgcaaaaactggagagatcctagcgacaacgcaacgtccatcctataatgcggataccaaacaagggttggatctgaaaaacttgaaaacctggaataccatcctttatcaagatcaatatgaaccgggttcaaccatgaaggtcatgttattagcttcggcgattgatcatggaaccttcccagcctataatgaagtatactacagtaacgaactacaagtaaaagatgcgaccatccgtgactgggatgtcaatatgggactgtctgaaggtcgctatatgaatatcgcacaaggctttgcttactcaagtaacgtggggatgacccgcttggagcaaaagatgggaaatgctgtctggatggactacctaacccgctttaaattcggtcttccgacccgttttggaatgggaaatgaagcttacgggggtcttccaggggataactatgtcagtcaagccatgtcttcttttggtcaagggatttccgtcagtcaaactcaaatgttacgggcctttagtgccatcgctaatgatggacaaatgttggagccgaagtttattagtgctatttacgataaaaaatcagacacagcccgcaaatcaaaaaaagaagttgttggaaaaccagtttcaggatcagctgcacaacagacacggaactatatgatcaccgtcggaacagatccagagtatggaaccttgtacagtgatggacccatcattcaggtacccggtcaaaacgttgcggtgaaatcagggactgcccaaatggcgacagatcaaggatacttgcaaggagaaaatgattatatctactcggttgtagccatgacacctgcagaagatcctgaattcatcatgtatgtgacggtccaacaaccagaagtgaaattctcattcaccagctgggaagagctggtcaatcctattttggaagatgcagttgctttaaaagacgaattgcatctaacatcagaggcaccaactttggatgatgtgaccaaagaaacgacctacaaaatcccttcagtagaaactctctctaaggagttgaatctgaaacaaaatctgagcccaggtgcttattcagaggaattgcgtcgcaatttggtgcaaccaattgtcctaggaaccgggaaaaatatccgcaagatgtctgtggatgtaggctctaaagtcaaagccaatcagcaagtattgttattgacagaagactttgatgcggttccagatatgtacggttggactaagaaaaatgcagacatctttggagaatggactggaattgagattacctataaaggtagtggaaagaaagtaaccaaacaaagtgtcaaaatgaacacctcacttaataaaactaaaaagattacgttaacattaggagactaagatgtatattgctacgatccttgtatcgtttctattaacagtggctgctattccagcctttattcgattttaccatcgtgctcatatttctgggcaacaaatgcacgaagatgtgaaacaacacaaagcgaaagctggcactccgacaatgggtggagttgtatttctcattacagccgttctagttagttttgtcgttaccgtattgactggaaatttcacgcgccctgttcaactgattctatttatcttgattctttatggaattgttggatttttggatgactttttaaaagtttttcgtaagattaatgaaggtcttaacccaaaacaaaaattggcccttcaacttgttggtggaatcatcttctatattttttctgaacgccacggtgcaggaagccttttaaatgtctttggttacgatctttacttgggccatttctacattctctttgctttattttggttggttggtttttcaaacgcggtcaatttgacagatgggattgatggattagccagcatctccgttgccattagcctgagtgcctattcctttattgcctatatgcaagggaaatgggacattctctttgtgactttgagtatgattggggccttgcttggattctttgtcttcaaccacaagccggctaaaatctttatgggggatgtcggtagtctagctcttggagggatgcttgcagccttgtcaatggctctgcatgtcgagtggacgttgctcttgattggtctggtctatgtcattgaaacaggttcagtgatgctacaagtgacctatttcaaatggaccaagaaacgttacggggaaggacgtcggattttccgaatgactcctttccaccatcatttagaactgggtggcctttttggcaatgggcaaaactggtcagaatggaaagtggatgcctttatgtggaccattgccttggtgacaagtgtcgtgactctagttcttctctacctataaaacgacggtgggctttcccatcgtttttttactgactcagagagacttcgctggttaggaaaaatgactcataagagaggcaagaagacagcttttctgatataataatagagatcatgaaaggaactgagaaaatgaaatttacagagtttaattttaagccctatattcaagaggcactgaaagaaatcaattttagagaagcaaccgaagtacaggaaaaactaattccgattgtcctagatggaaatgatttggtaggagagtcaaagactggttctgggaaaacccatacgttcctcttgccgatttttcaaacgttaaatgaagacagtgagcaagttgaagcggtcatcacggctcctagtcgggagttggcgacgcaaatttaccaagctgctcgtcaaatcgctagtcattctgaaaaagagattcggattgtgaattatgttggaggaacggataaaagccgtcagattgaaaaactccaggtcaaacaaccacatatcgtgattggaactccaggccggatctacgatctagttgcatcgggtgatctggctattcataaggcccatacttttgtggtagatgaggcggatatgacactggacatgggattcttgtcaaccgtggataagattgcttcaagacttccgcaacaactgcaatttttagttttttcagccaccattccgcagaaattacaacctttcttgaaaaaatatctctcaaacccagtcatggagcagattaagaccaagacggtgatttcagataccatcgataattggctggtttcgaccaagggtcgggataaaaatgagcaaatttaccaattgaccaagaccttgcaaccttatttggctatgattttcgttaataccaaaacgagagcagatgatctccatgcctatttagtggctcaaggattaaaagtggcgaagattcacggagatatcccaccacgtgaacggaaacggatcatgaatcaggttaaaaatcttgattttgagtatattgtggccacagatttggcggcgcgtggaattgatatcgaaggggtgagtcatgtcatcaacgatgccattccacaagatctttccttctttgttcaccgtgttggccggacaggacgcaatggtctaccaggtgtcgctattactctttatcaaccgagtgatgattcagatatccgtgaactagaaaaaatgggcattcgtttcgtaccgaaagtgttgaaaaatggggttattgaagatacttatgatcgggatagacgggccaatcgtgagaaaaagcaagagaaactcgacatcgaaatgattggtctggtgaagaagaaaaagaaaaaaatcaaaccaggctacaagaaaaaaattaaatgggcagttgatgaaaagcggagaaaagctaagcgagctgaaaaccgtgcgcgtggtcgggccgaacgaaaggccaaacgtcaaactttctaaccccttctttcaaatgttcagaagaaaacatagattttctttatgaactccataaagaaaaactattaggaacttgtctaaaattatgatagactaaatttgagtagtctatcatttttctatttctgtagcaatttttggaattccgatagtgaatgtgatagaatgtttatgttcgagaaaggaagtaacaaaaatgtttacaactaatcttttaactgccaactggtatgctgactttttaaaacacgttccagatagcaagctgtttagtttgagagccgtattggatgcatttccggcagtcattgggaaattgcctgtgacgattttattagccctaggaggcgcattttttgggattatttttgccatgatttttgctctggtcaaaattaatcgtgtacgaattctttacccgattcaagctgtttttgtcagttttttacgggggactcctttgttggttcagttgatgttgacctattatgggattcctcttattttaaaagcgatcaatcagtcctatggaacagcttttaatattaatgccattccagctgagttatttgcaattgttgctcttgcctttaatgaggcagcttatgcgagtgaaaccatccgggcagccattttatcagtggatcctggtgaaattgaggcagcgcgtagtcttgggatgaccaaccgtcaagtttatcgccggattattattcccaatgcagcagtcgttgcaactcctactttaatcaactctctcattggcttgaccaaggggacctcgctcgcctttagtgccagtgtggttgaaatttttgctcaagcacggattattggggggagcgatttgaagtactttgaacgctttatcacggtatcgattgtttactggattgtgaacattctcattgaaatactaggccgtcacattgaacgtcgactggatattgagactcccgtagcaattgatttaccagatcaggaggtccggatctaatgatttatatttcagaattatcaaagacattttcaggtcaaaaggttttaaataatctaagtttggaaattcaaaaaggggaagtcgtggccctaatcgggtcttcgggagctggtaaatcaaccttcttacgcagtttaaactatttggaagcaccagatagtggtagaattaagattgatgatttcgaagttgattttgagcacattagccaagatcaaatcttaaccttaagaagaaaattggccatggtgttccaacagtttaatttgtttggtagaaaaacagcccttgaaaatgtgaaagaagggctcattgttgtgaagggcttatccgatcaagaagcaacgaaaattgctcgagaagaactagcaaaagtcggtttatcggatcgtgaaaatcactatcctcgtcacctctcaggtggacaaaaacaacgggtggctttggcccgtgctttggccatgaaaccagaagttcttttgctggatgaaccgacttcagccttggatccagaattggttggagaagttgaaaaatccattgccaatgctgcaaaatcaggacaaaccatggtactggtcagccatgatatgtcttttgtagcgcaagtagcagataaggtcctatttttggataaaggacggattattgaatctggaacaccagaggaaatcatgcaacatccaaaagaagaacggacaaaagaattctttgctagttacaaacggacctatgtttgatataatagaggagaggtaagactcagctggcgatgctagctgggtttgttttctgaaaatgtaaaaatatttggagtcgtgatgttaaataaattattgtccttatatttacaaagtttagtgacgacaacgattttagttgggatcgcttcttgtatttggattggctaccgtgcccttaagaagaaagataaaacagccaagcaacgacaagcccatttgtatgatatcctcttaattgatatcatgacgattcctattttaacctttgcggtcatagggattttgtttatctttcaagcacgataattgcaaaaagaccgtgttagaattataatggttacaacaaaacagaaagaggttgagtatgtttgatacagtgattattggagcaggtcctgcagggatgactgctgccctttatgcagcacgaagcaatttaaaggtcgcattgattgagagaggaattccaggcggtcaaatgaacaatacgtctgacattgaaaactatcctggctatgcgaatattagtggtccagacttggctgaaaaaatgttcgagcctttagagaatcttggtgtagaacatttgtttggacaggtagagcgcatcgaagaccacggagcaaccaaaaagattgtcacagatgacggagaatttgaagctaaaactattgtgattgcaacaggttccaaccaccgtttattaaatgtccctggtgaagaggagctgaatagtagaggggtttcctactgtgctgtttgtgatggagctttctttagagacgaggatctcttggtcgttggtggaggcgattctgcggtagaagaagctgtttttttgactcagtttgcaaaaacagtgaccattgcccatcgtcgtgatcaattgcgtgctcaaaaagttcttcaagatcgtgcctttgccaatgataaaattcactttgcttggaatacagttgttgaagaaattaagggtgaacaaaaagtaacgtctgtccttttaaaagatgtgaagacaggagaggttagagagcaagccttcggtggtgtctttatctatgtcggtttagatcctgtcagtgaatttgcgacagaacttggtattttagatgaaaatggctgggtggtcacggatgatcatatgagaaccacagtcccaggtatttttgcggttggcgatgttcgtcaaaaagatttgcgtcaagtgacgacagccgtcggagacggtgcgattgctggccaagaagtttataaatatatcacagaaaacttttaatccaaaaaatctgagcttcctgtctcagatttttttcatgctttcctttcagtattcaatagagctgaaatgtgctataatggtactaattttatggtaggaattcatagaacaaatcaataaaaaagaggtatacatatgtatccagatgacagtttaactttgcatactgatttataccaaatcaacatgatgcaagtctattttgatcaaggtatccacaataaacatgctgtatttgaagtgtattttcgtcaacagccttttaaaaacggttacgctgtatttgctggcttagagagaattgtgaaatacttggaaaacttgagtttttctgagagcgatattgcctatttagagtcacttggttatcatggggccttcttggaatatcttcgtgatctcaagttggaattgacggtacgatcggctcaagaaggagacttagtctttgcgaatgaaccaattgttcaggtagagggccctttagctcagtgtcaattggtggaaacagcccttttgaatatcgtcaactttcaaaccttgattgcaacaaaagctgctcgtattcgttcggtcattgaagatgagcctttgatggaatttggaacacgtcgtgcgcaagaaatggatgcggccatttggggaactcgtgcagcagtcatcggaggggccaatggaactagtaatgttcgtgcaggaaaactctttggaatcccagttttaggaacccatgcccattctcttgtacaagtatatgggaatgactatcaagcctttaaagcttatgcggaaacccataaagattgtgtcttcctcgtcgatacctatgatacgcttcgtattggggtaccagcagctattcaggtagcgcgtgaaatgggagataagatcaatttcctaggcgtccggattgactcaggagatattgcttatatttctaaaaaggttcgccagcaattagatgaggctgggtttacaaatgctaaaatctacgcttctaatgacttggatgaaaataccatcctcaacttaaaaatgcaaaaagcaaaaattgatgtttggggtgtaggaaccaagttaattacagcttacgatcaaccagcgcttggagcggtatacaaaattgtctctgttgaaaacgaagcaggagagatgatcaataccatcaagctttctaataatgcagagaaagtttctactccaggtaaaaagcaagtctggcggattacgagtcgtgaaaaaggtaagtcagaaggggactacattacttatgatggagtagatgtttctcaactgacagaacttaaaatgttccatccgacttatacctacatcaataaaacggtccgaaactttgaggctattcctcttttagtggatatttttaaagaggggcaattggtttatcaactaccaccattatcagaaattcaagaatatgctcgtaaaaattacgatcaattgtgggatgaatacaagcgtgtccttaatccacagcattacccagttgacttggcaaaagatatttggcaggataagatggatctaatcgaggaaatgcgtaacaaggccaatggagaaggagaagcaaaatgagtttgcaagaagagattatccaacaattgggtgtcaagcctagcattgatcctcaggaagagattcgccgctcggttgatttcttaaaaagatatctaaaaaaacatcccttcttgaaaacatttgtattagggatctcaggaggacaagattcgactcttgctgggcgattagctcaattagccatggaagaaatgcgctcagagacaggagatgcctcctatcaatttattgctgttcgccttccttatggggtacagacagatgaagaagatgctcaaaaagctttgacctttatccagccagatgtcagcctagtcgttaacatcaaggaatcagttgatgccatggaacgcgctgtcgaagcaacaggaacggatatctccgacttcaacaagggcaatatcaaggctcgcagtcgcatgattgctcagtatgctctagctggagcacgcagcggagcggtgattggaacggatcatgctgcagaaaatattactggtttcttcacaaaatttggagatggtggtgcagatattttgccccttttccgtttgaataaacgccaaggaaaacaattgcttaaggccttaggagccgatcctgttctttatgagaaaatcccaacagcagatttggaagaagaaaaaccaggaatagcagatgaagtagcgctgggtgtcacctataatgaaattgatgattacctagaaggcaaacaagtgagtccagaagctcaagccactattgaaaaatgttggtacaaaggccaacacaaacgccacttgccaatcacagtatttgatcatttttgggagtaaaaaggtccagtggacctttttagcccgagtcttaaaataggagaacgaggtagaaatcggtaactcgtagagttctatttcgtagtctcaccatacaatattgtgaaaagcattaaaaagaagggcggtttcatccgtccttttcttctagattaaagtaaccaacttgcaaagttcaagttgcatgaaaaaatgaagggagacaatctatgaagcatcttggaagtcttgtcatagagacggagcgtttatacatgaggcctttcgttttggaggatgcatcagcgatgtttgaaaattgggcttctgatcctgaaaccctgaaatatgtcacctgggatgcccatgcatcttctgagagaactagagaatcgatcaaacgatggatcgaacagtatcgtaaatcagatacttataaatgggcgatctgtttgaaaacatcaccggatcaggtaattggagatattagtgtggtttctcaggacccggaaagtcaatcatgcgagctaggttatatccttggcaagaaattctgggggcagggattcatgacagaagccgtcatagctgttttggctttcttattgaacgaagtcggatttaaagaaatcaaagccacttatgtcagtttaaatcctgcttcagggaaagtcatggaaaagacaggaatgcagtatgtagaaaccatccctcatgccattcaacgcaaaggatattgtggggataaaatcatctattctatacagaatccctctctatagggtgatttttacttgaagattctgctcaaaggattataatagtaaataacgaaaaaaggagattgctatgtcagaattaacgaaagaatttacagaccagctctatgctaattatgaagcaaatgtgaaatatgcggctcttgaaaatgctgttacccacaatgggatccatgcatcgcttgaaacgcgcaagagtgcagtagaaaatacaccagttttttcacttgatttgaccaaggataaggtgacaaaccaaaaagcatctggacgttgttggatgtttgcggctttaaataccttccgtcacaagatgatttcaagcttccaattggaggattttgaattgtctcaagcacatactttcttttgggataagtatgaaaaatcaaactggtttttggagcaagtgattgctacagcagatcaagaattgaccagccgtaaggtggcttttctcctacaaaccccacaacaagatggtggtcaatgggatatggtggtatccctctttgagaaatacggagtggttccaaaatcagtttatccggaatcgatttcttcaagtaatagccgggaattgaacacctacctcaataaactcttgcgtcaagatgcgcaaatcttgcgtgacttgattcactcaggcgcagatagtgaggcagttgcgagcaagaaacaagcgttgttgcaagaaatctttaacttcttggctatgtctttaggattgcctccgcgtgaatttgacttttcataccgtgataaggacaaccaattccataccgaaagtggcttaactccacaaagcttctacaaaaaatatgtagaccttcaattagacgattacgtctccattatcaatgccccaactacagataagccatatggaaaatcttacaccgtagatatgctgggcaatgtggttggtagccgtccagtccgctacctaaatgttccaatggatcgattgaaagaattagctattgctcaaatgaaagcaggagaaactgtctggtttggttcagatgtaggccaagtcagcaaccgtaaagccggaatcctggcaacagatgtctacgattttgaagcaggcatggacattcatttgacacaagacaaggcgggtcgcttggactatgcagaaagtctcatgacacacgctatggtcttgacaggggttgatttagacgaagcaggtcagcctcgtaaatggaaggttgaaaattcatggggagacaaggtcggtacagatggttactttgtggcttctgatgcttggatggatgaatatacctatcaaatcgtggttcgtaaagaattcctaacagcagacgaattagcagcctatgaagcagaaccaattgtcctagcaccgtgggatccaatgggagctttagcaaaataatgatatagaaaagagccgaaaggctcttttcagattgaagacaaaatatcttaaaaactttccttaggtgagtacggacgtcagcgaacttctttaaagttccatgactaattattgagtctaaggtctcaataattccgagtgcctgaaacaataacgtttcaagcacttttctcacagcggaaagtttcagtattttcttaaatcgatttaaatattggaactcaattttgttttttgcagaatcacttaacttattttgctttaaaatagtttgtctacattctaataagagccgaaaggctcttttttttatatactcaaaaataaaaaagctgggaagtctaactaaataaatcagattttattcgttctggttttttaaccattgttttaaaaaaagccgggcaaaagcccgacttctccattctattattcgttatgattgttagagtcttgcgaagaaggctcagatggtttagattgattttcttcgttcgaagagctagacgatggttcttcatacgaatactgatcagtggaataacttggctcatagtagtagttattgtagttgttcttaccattgtttaagtagagataagaaccacttcgatacagtccacttggttgcgtccaatccgtatgaccagagttattattattagcaagatagagcatcatttgacggtagacatccgttgcgacctgtattccattatccaatactggtgtaaagcgattggaataacctgtccatactgccatggcatattcaggagtgtagcctacaaacaattcatccggtgttacaatatttgaataagcattttttgtcaatttaccgatttcgttatcagcatagtttgatgtacctgtcttaccagcttggtagattcccgaaatggcagcatttgtaccggtaccagacaagagaactgtcttcatcatatctgtcatcatgtaggcagttgttgctttcattgcacgagttccttcggactcaaattccttggttgtgccatcactaaagacaacccgactaacataggatggtttgtaataggtaccgccattggcaaaagcagcataggcagctgccattttctcactgctggctccgtatttgttgctagaatcgctagtgttactcgagatagcgttggcgtaaaccatttctgggtaatcgatccctaatccattgaggaatttcttagcttgtttaagaccaactttttccagggccttcaccgcaggcacgttacgagattgttgaattgcgtaggtaatggacatgctaccatagtatgaacggtcccagttgtagacaggcgttgatgaatgagggaagttgtatggcgcatctgttgtagtagctgctgtagaggtatattcctcatgttcaagagctggtgcgtaatctgtgattggtttcattgttgaaccccagtcacggttcgtttcaaccgcttggtttgtaccaaaggaaacattgctggattggtgacgagaacccagctgagcaatgactttaccagtattgacatcaataacggtagaagctacttgcatttcatcatccgggtaattgacatattcatctgtattgtagatatcccatagtttcttttgagcttctgtatccacgtttgtatagacatccattccggttgtcaacaaattgtagcccgtttcttcttcgacttgctcgatcacttcttttaggtaattatccatataggctgggtaactgcttgaagaactgagactttgcagaccatctgtaacaggtgtattgaccgctgcttcgtattgtttgttagaaatggtcttcatatcgagcatttcttttaatactaagtttcggcgctgttgcgctgcttcaggatgggagtatggatcgtattggtttggtgcttggggcatccccgcaaggagtgccaattgagggagcgaaagatcttttagatcttttccgtaataacttttcgcagctgtctgcattccgtagttcccattcgccataaatactttattgacgtaataggtcaagatttcttgtttggttgctttcttttctagttgggttgctaaccaagcttcttggatcttacgagagagggtacggtcagaggctgaagtggagaaataggttaacttgatcaattgttgcgtcaaggttgacccaccttgacttcctcctcgtaagttgtgaaggaaggaaccgccgatccgaatgatgtcgaccccacggtgattgaagaaacggtggtcttcaatcgcaacgatagcattgaccaaatcagtagggatttcattggctgtgacattgattcgtttctcagctcccaaatccgcgatcaagttattttggttgtcatagatcttactagatgttgttgcaaccaaatctttttcagacaaggttggtgctttcatagcatagtaactaaatatcagtccaccgaggacaaataaaagtaagaaaaatgaaatggctgcgatggcaacatatttcaaccattgaatgactgtttgtttattcatttaaataccgcctagaagtttctgttcgataatatcaagataaggaacgcttggaagacgattcttatctactagaaagccgtgctcctgaatataggagaggggcatggatttactaccatgatcgatgttgtaatagtgaattaatgcaggagcaggaagtaagtaggtttcactcaactttgcaaaatgcaagagaacgaaacagataccgccttgctggacaaccgcctccatatgatcgatttgatgttgatgaaaatttttcatcggcatggattgcttttgctgtgtttccttagcttcaaaatcgatatagcgtcccttgtatactccagaatagtccgtcgttgaggcttgcctgaaataggcttcaacaatctttgcccgactgcgacgtggataatctactttcacgatttgaatcggtgttggttttttatggatgactgccagacctcgagaaagatagtattgattactttcattgatcattttttcaaatgtcatcccacgattcgcaaagtcgactggatgtttcctttgtgtagagaccaaggtttttttggctactttatgtggatagttgaccatagttctccttattggtacaattacatcactctattatatcataaattagaataatgaggaaaaaatgaataccatacttgttgcaggttataagagttttgatgtgggcgtcttttccaataaagaccctcgactgaccattatcaaaaaagccattgaaagagatcttcgtcgtttatttgaagaaggagtgaaatggctggtcttttctggtaatttgggatttgaggcttgggtactagaggtcgcctttgcattaaaaaaagattacgattttcaaatggcgacgatcttcctatttgagaatattggcgaaaattggaatgaaagcaatcaggaattattagcacgcttcaaacaggtggatttcgtgaaatatgcctatccccactatagcaatccgggtcaactaaaagaatacaatcagtttttgatagataacgcggatggagcttatgttttttatgatccagaaaatgaaaccaatttaaaatatctttacaaaatgatggtagaaaaagaaccattttatgtcaaacaattaagttttgatgacttaaatgaacttgctgaaaatttttacgaaaactaagtgttataccttgatttttcttaccatttttttatataattgagatgatgaactagattggagagagtaatggcgagtattatttttactgcgaaagatatttttgatcaagatttcaaacgagaagttcgtggttataataaagatgaagtaaatgaatttttggatgatgtcataaaagactatgaaacctatgctgctttggtgaaggaattgcgtgaagaaaacgcccgccttcgtgaagaacttgcccaaaaagcacaggaaacaccacaaacatctccgattgctagcactgctacgcaagaatacccgcaagtgacaacagcgacgaactttgatattctcaaacgtctcaatcgtttggaaaaagaagtttttgggaaacagatcgtagatcgcgattattaatcccatagattgtgcaatttttggataatcgcgtgagagaatcctctcatgaggaaagtccatgctagcacaggctgtgatgcctgtagtgtttgtgctaggtgaatccataagcctagggacttggtattcaagttacggcgagtgaaggagctaagtctaaggataagctctagtaactctgaaagtgccacagtgacgtagtttttagggaaacctaaaaagtggaacgcggtaaacccctcaagctagcaacccaaactttggtcggggcatggaatgcgtggaaacgaacatagcattctgactggaaacagtagacagatgattatcgaaggaaatggtacctagtcatttctggaacaaaacatggcttatagaaaattgcatataggttgatgaggtggagagagatctcaacctccttttttaaagtgataggaataagatgaaaaaacaatttgaattgattgcaacggccgctgctggtatagaggctgttgttggtcgagaactacgcgatctcggctacgattgccaggttgaaaatggacgggttcgatttcaaggagaccgtcgagcaatcatagagaccaatctctggttgcgcgcggctgatcgagtaaaaattgtggttgggacttttccagccaaaaccttcgaagaactctttcaaggtgtctttgctttggattgggaaaattatttgcctttaggagcacgttttcctatttctaaggctaaatgtgtcaaatcaaaactccataatgaacctagcgttcaggccatttcgaaaaaagcagtggttaaaaagttacaaaaacactatgcccgaccagaaggtgttcctctcatggaaaatggggcagagttcaagatcgaagtatcgatccttaaagaccaagccactgtcttgattgacaccactggtagtagcctcttcaaacgtggttatcggactgaaaaagggggagcccctattaaggaaaatatggcagcagcaattcttctgctgtcaaactggtatccagataaacccttgattgacccgacatgtggttctggaacgttttgtattgaggcggcaatgattgcgagaaatatggcacctggtttacgtcggaccttttcttttgaagaatggaactggatggatgatcgcttgattcatgaagtccgtcaagaagcaagcagaaaaatcaatcgcgagatcgaattggatattatgggaaccgatatcgatgcacggatggttgagattgccaaagaaaatgcccagaaagcgggcgttagcagtgatattactttcaaacaaatgcgagtccaagatcttcactcagataagatcaacggggtgattatctccaatcctccatatggagaacgcttatccgatgatgaaggtgtgacgaaattgtatactgaaatggggcacgtatttgcacctctcaaaacctggagtaaatttatcctaaccagtgatgaaggttttgaatctaaattcggtagtaaagcagataaaaaacgaaaactttataacggaaccctaaaagttgatctctaccaatattttggggaacgagtaaaacggcagattaaggcatagaaaggatttttatgacagagaaggataaaaagccattagagcaagaaacagaatcaattttagagtttgaagatgctaaagagatgacgattgggcaggccaatcgaaaggcagaagaaatcgaagcaggtgtcactgaaggtgataatgtcttagacaaatacatcaaacaacaccgagcagaaattgaagctgaaaaatacgatacaaaaattttggccaaagaagaattggctaaagctgaagagttggcagctacagaaacagttgctgaagtagctgaagcagtggaggagccggaagtgacggaaacggtcttggaacaaaggcctgaaatggatgctatctcaactgaattacctgctaagattaaatttggtcccacaccaactgaaccaattgtagaagctgaggaacttcctgaggaaacaccaagcaatgcgggcaaacgaatcaaagcggttctatactctgccttaggtcttgcgattgtcggttcggccatttttgtgacctataactggatgcacagtcgtggaaaatctggtggtacaactgttgtatcgtcttcatctagcaagtcatcttctacttctaaatcaagtagcagtgaaacacaggctcaaaaattggaagagtttaccaaagcctacgatgccttttttgtagatgaatcaaaaagtgctcttaaaaatgataaattcggagacttggaaaatctgaagaaactgctggacaaattagaaggaagcagtgattataatgcggctaaaacaaaatatgaagaccttgtgaagcaagtttctgccattcaaaaagtgaattctcaatttagttctccagtcatcaaagatggagttcttgatgcaactgccaaagcgaaaagtgatgcgacctttgcagaaacaaagacaggcaatgaaaaattagatagcttattgaatgaggcggttgcgcaaggacgttcacaacaagttgcgacaccggcaccagtgacagggacaggtggtacagatacttctaatgcaactccagccccagctcaagcagcaacgcctacggccccagctgtcaatgctgctacaggtagtgcaggaacggcaaacccaggctattcagggtacggtcttccaagcgatggtgtcccacttcaacggaacttgagccgtgtgccatataaccaagcagctatcaatgatgtcaataacccggcttgggtgtttggtgatgggatccttgaaaaagtattgaacattgctcgtaaacgtgggcatatcactggcaatcaatacattttagagcgtgttaatatcattaacggtaatggctattacaacctcttcaaaccagatggaacctatctctttagtatcaatgccaagactggttatttcgtagggaacggcaaaggtcattcagatgctctggattattaatacctgagcagacatctcttttctgggaaaaatgacaataaaaaagagagtgggacagaaatcggtaattcgttggaattcgatttcgtcgtcccacctccgcacagttgagtagggctgtaaaagctgatgaaatcagcgtagtagagtccactcaaccactgcgtcttgctcgacaatccaaaaataattgagaggctaggacttttgtcccagcctctttttcgtattaaacaatatgacgttcaaagggattatctgagattccttgatctagaatcaggcgacaccattcttttgctgaaaagaggctgtggtccttgtaatttccacaagactcaatggttgtgcctgggacatcctcccaagtgctgactgatgcaatttcttctaaagattctttaatcactttagcaatttccgtactcgaatgctgtccccacatgatcatatgaaaaccggtgcgacatccaaatggggaacaatcaatcataccatcgatgcgtttgcgaataagcatcgcaagaaggtgctcgatcgtgtggagccctgcagttggaatcgcattttcattgggttgcaccagacgaatatcgaagttagagatgatgtctcctttgggtccagtttcttccccaatcaagcgtacatagggagccttcaccgccgtgtggtccaattcaaaactttcaacaattacttcttttgtcatactcaaatccttctttgtttttcttgattatagcataaaaaagcagattcaacaaagtggaaataaatgaattcctcacagatgttccatgaaagaaaagacgataaaagaataagcattaagcaaaaatataaaaggtttttcctgtttttttagattgttaattttagtaatttatggtaaaatgtaaaagaatttttaattcaactaattaaatagatttggggtaaaagcatgaattttgttattacaggtgtttttgccgcggtcattggtttagtcattggatatgtgggaactgctcttaaaatgaaagcttcaaaagaggctgcggaactcacccttttgaatgctgaacaagaagcaacgaatttacgtggacaggctgaacgcgaagccgatttgattttaaaagaggcgaagcatgagtcaagttcacttaaaaaagaagcacttttggaggcaaaggaagaagccagaaaatatcgtgaagaggtcgatgctgagtttaagtcagaacgacaagaattgaagcaattagaaagccgtttggcagaacgtgctagcaatcttgatcgcaaagacgacattttaacaagcaaagaacagtctcttgaacacaaagagcaaagtcttacagatagaactaaacacattgatgcgcgtgaacaacagctggaagagcttgaacacaagaaagtagaagaactggaacgtgtcgctgctctaagtcaaggagaagcgcgtgacattattttgagtcagacggaagagcaactttcaaaagaaattgcctcacggattcgtgatgctgaattggaagtgaaagaacgttctgataaaatcgcaaaagacattctcgtgcaagctatgcagcgaatggcgggtgattttgttgctgagcaaacaaactcaaccgttcatttgccagacgatagtatgaagggtcggattattggtcgtgaaggtcgcaacattcgtacctttgagagcttgacaggtgtcgatgtgattattgatgatacgcctgaagtggtgaccttgtcagggtttgatccgattcgtcgtgaaattgcccgcatgacaatggagagccttctcaaagatggtcggatccatccagcccgtatcgaagagctggttgagaagaaccgtcaggaaattgacaatcgtattcgtgaatacggtgaggcggctgcctatgaaattggtgcgccaaacctccatccagatttgatgaaaatcatgggacggttgcaattccgtacttcttatggtcaaaacgttttgcgtcactccattgaagttgccaaactttctggtattattgccagcgagttgggtgaaaatgctactttggcacgacgtgcaggattcttacatgatatcggtaaagcaattgaccgtgaagtggaaggaagtcacgtcgagattggaactgaattggcacggaagtacaaggaacacccagtggtggtcaataccattgccagtcaccatggtgacgtggaaccagaaagtgtcatcgcagtcattgtcgctgcagcggatgccttgagtgcagctcgacctggagcacgaagtgagtcacttgaaagctacatcaaacgcttgcaagatcttgaagaaattgcaaatagttttgaaggagttaaaacaagtttcgcccttcaagcgggtcgtgaaatccgtattatggttagccctgaggcaatcaaggatgataaagtgacgatcttggctcatgatattcgtgagaagatcgagtccaatcttgaatatcctggaaacattaaggttaccgttattcgagaattgcgtgcagtagattacgcaaaataaacaaaaagcttgagatctagtatctcaagctttttgaatgaaaaaatcagttgaaaattaggccgatttttgttacactagatagaaagacattgaaggagaaatcatggcggatcgtggcttattaatcgtattttctggcccttcgggggttggaaaaggaacggtcagacgagaaatttttgaaaactcggacaatcagtttcagtattctgtatcgatgacgacgcgtgcacaacgtccaggtgaagtggatggtgtcgactattttttccgtacacgtgaagaatttgaagatttgatccgtcaagggcaaatgttggagtacgctgagtacgttggaaattactatgggactcctttaacctatgtgaatgaaaccttggacaagggaatcgatgtattccttgaaattgaagttcagggtgcacttcaagtaaagaagaaagttccagatgcagtttttattttcttaactccgcctgatttggatgaattgcaagatcgattagtgggtcgcgggacagatagtgcagaagttattgcgcaacggattgaaaaagcaaaagaagaaatcgctatgatgcgtgaatatgactacgccattgtgaacgacgaggttcctctcgctgctgagcgtgtcaaacgtgtgatcgaagcagagcatttccgtgtagaccgtgtcattggccattatctggatatgttaccaaaaacacaaactattgtgaagagataaataattagaaattaggtataggaatatgatgttaaaaccttctattgatacattgcttgacaaagtaccatcaaaatattcattggtcattcttttggcaaaacgggcccacgaattggaaagtggtgcagtaccaactcaagaattccaatcagttaaatcaacattacaagcgcttgaagaaatcgagtctggaaacgtagttgttcacccggatccagaagcaaaacgtgaagcgcttcgtcgtcggattgaagcagagcggattcgcaaagaagaagaagagcgcaaaattaaggaacaaattgccaaagaaaaagaagatggtgaaaaaatttaaggttggggcttctcaatcttattttttgctatttaaagggttccatgataaagtaaagctcatatgatagaggctggaggtgaaaatgtgatagcaaaagtcatcgtagatgtcccgttgatgcagacagataaaccctattcttatcagattccattagaatttgaggatatggtggaggcaggtatgcgagttcatgtcccctttggtaaagggaatcgcctcattcaagggattgtggtagacgttgtagaagaggcagacacgagcgaggaattaaaagcgattgtggaggttttggattacactccggtcttaaatcaagagcagttctggttggcagatcaattacgaaaaagtgttttttcttataagatcacgattttaaaaaccatgcttccttctctcctcaattcgagttatgataagattttgtatcctcaaccttctttagagcccactctcaaagtgaaactttttggtgaaaaaaatgaagtttctttttcttctctagatgcggccgatcaagcccaagtgatgcggttggtcagaaaaggagatttggtacttgaatacaaggccaaggataagaaacaaattaaaacagaaaaatggtatcgcgttaaccaggaaggattaaaagaacttcaaccatcagcgagagctaaaaaaaggctagcattaaaagagcgcctgtttctagagcaaggggagcaacccttagcaggattgtatcaggatttttcacgagaagtagtggcttattttattgatcagggtgttttagaaattacagaacgagaagtgaatcgggcagctgaatactatgaaggaaaagaacagacccaggccctgcatttaaattcagagcaagcaaaagctgtcgaaacagtagtttctcaaattgggaaaacatcaaagccttttttattagaaggtgtgactggaagtgggaaaacagaagtttatctgcagattattcaggaagttctaaataaggggaaaacggctattatgttggttcctgagatttccctgacgccacagatgacggatcgttttatctcgcgttttggtcaggaagtagccattctacactcgggcttatcaaatggtgagaagtatgatcaatggcgaaaagttgaacgtggggaggccaaggtagtcgttggagcacgctcagccatctttgctcctttaaaaaacatcggcgcgatcattattgatgaggagcacgaggcttcctacaaacaagatagtaatccacgctaccacgcaagggatgtcgcagtcctaagggctcagtacaatcaagcagtcttgcttcttggatctgctacaccaagtttagaatcacgggctcgtgcaacaaaaggggtttatgaattaattcgtctcacccaacgggccaatccggcagccaaaattccagaagttaaagtcgttgattttcgtgattatattggccaaaatgaagctggtaacttcactccggttctagtggaagctattgctgatcgcttgcagaaaaaagagcaggttgtcttgatgttgaaccgccgtggttattccagttttgtcatgtgtcgcgagtgtggaactgtagatacttgtcccaattgtgacatctcactgaccctccatatggatactaaaaccatgaactgtcattattgtggctatagtaaagcgattcctcgacgctgtccaaattgccaaagtccttctattcgttattacgggacaggaacgcaaaaagcctatgatgaattacaagagatctttcctgaagctaaaattctgcgcatggatgtggataccactcgaaaaaaagggagccacgcagcgatattagatgctttcgggaatggagaagcggatattttgttagggacgcaaatgattgcgaagggcttggattttccaaatgtgacgttagtgggtgtcttgaatgcggatacttctttaaatttaccggattatcgatcctctgagagaacctttcaactcttgactcaggtggcaggaagggccggacgagcagagaaagaaggagaggttatcattcaaagctacaaccccaatcattatgcgattcgatttgccaaagaccaagattatgaaggtttttttgcctatgaaatgcagattcgccggcagttaggctatacgccttattacttcacagttgggttaaccctatcccataagagtgaggaaattgtgatggagaagtcacatcaggtcatggaaattctccgatctggcttatctgatcaggtccaaatcttaggaccaacacctaaaccaattgcacgcacacataatttgtatcattatcaaatcattgtgaaatatcgttttgaagaaggcatgacacaggtcttgaatcaaatcttagaatttactcaagaaagaggcaaccaagatctccgtgtcagtattgataatgaacctcaaagtttcatgtaaggaagaaagaaatgacaaaattaatttttatgggaacgcctgatttttcagcgacggttttaaagggattgttagcagattcgcgctatgaaattttggcagttgtgactcaaccagaccgcaaagtaggtcgcaaaaaagagattcgaatgaccccggtgaagcaggtagctttggaacatcaactaccggttcttcagccggagaaattatcgggtagtccagaaatggaaactctcttatcactagatgcagatggaattgtgaccgctgcttttggacaatttttaccgacaaaattgttggagaacttccaatttgcagtgaatgtccacgcgtctttgctgcctaaatatagaggtggggctcccattcactatgctctgatcaatggtgatgaagaagctggggttacaattatggaaatggtcaaggaaatggatgccggagacatgattgcagctcgttctctcccaattttagatgaggacaatgtgggaactttgtttgaaaaattggctgtccttggacgtgacttactcctagatactttgccagcttacctggcaggggagatcaagccaagtccacaagatccaagtttggttacattttcaccgaatattttaccggaagaagaggttttggactggaccaaaaccaatcgccaagtctttaatcagatccgagggatgaatccttggccggtcgctcatacgttattaaatgggcaacgctttaaagtttatgaagcagagctatgcgaaggaaatggaaatccaggagaagtgattgctttgaccaaaaaagagttgctggtcgctgcaggagaaggcgcattgtccctcaaagttgtgcagccggcaggaaaaccaaaaatgtccatcacagactttttgaatggcgctggccgtcaattgaaagtaggagatcactttggaagttaaacaaatgaatgcgcgtgaacagatcgttcgagtgttagaagaggtttttgaacagggagcttattctaatattgcactaaatcaagcgctagaacactctcaactttcagataaagatagaagctttgttacggaagttgtatacggtactgtagcacggaagataacactcgagtggtatctcgcccacgtaattgaagaccggacgaaattagatccttggctctattatcttttgatgatgagtttgtatcaacttgtctatttagaccgaattcccgatcatgccatcgtcaatgaagctgtccggatagcaaaacgtcgtaaagaaggcagtgagaagtttgtcaatgctattcttagaaagctcctccgcgagggactaccagctattgatacgatcaagcgaaagaacaaacgttattcggtagagtattccctacccgtatggttggtcaaagcattgatcgaagaatacggtgaagaacgtgctggcgctatttttaagagtctctatcaacgtaataaatccagtattcgtgtgattaatctagacgaaaaagaagagttagcgcagctactcgaagcaatctcctctctacttgctccctctgctctcgtgaaagaacagggacattttgcggtgcattccttgtttaaagaagggcgcattactattcaagacgagtccagtcaattggtggcaccagctttggatttgcaaggagatgagtgggttttagatgcctgtgcggcgccaggtggaaagacgactcacctggcttcttatctcacaactgggaaagtcacagccttggatctctatgaccataagctcaaattgattcaagaaaatgctaatcggctccatgttgcggacaaaattttgacaaagaagttagatgcgacaaaagtctttgaaacatttggacctgatgctttcgataaaattttggtggatgcgccttgttcagggattggtttgatacggagaaagcctgatatcaagtacaataaagagagtgcagattttgtatctttacaagctattcaattggccattctggatagtgtttgtcaaagtgtgcgtaaaggtggtataatagtgtacagtacgtgtacaattatgggtaaagagaattttgaagtggtggaccaatttttgaaaaaacatccaaatttcgaacaagtcccattggatcacgaaagaaaagatattcttaaaaatgattgtatccttattacacccgaattatatggaagtgacggcttctttatcagtcgttttaagagaatctcataatatcaggaggaaactgacagtatggatatgacgatcttaaccgatgtaggtcaaagacggacaaataaccaagactatgcaaatcaatatacaaacaaggcaggaaaaccgatggtttttcttgctgatggtatgggaggacaccgtgccggaaatattgctagtgaaatggcagtcacagacctaggtgcggcttgggtttcttctgagatcgagacggttaatcaagtacgggaatggtttgcagaacatttagaagctgtgaaccgtcggattcatttggctgggcaagatgatgagcacaaaggaatgggaacgacattggaagctttggcttttgtagaaggacaagtgatttatgcccatgttggggattcacggattggcctcattcgtcagggcaaataccagcagttgaccagtgaccattctcttgtaaatgctcttttgcgagcaggtcaaattacagaggaagaagcagcccatcatcctcaacgtaacatcatcactcagtccattggtcaaaaagatgagttagagccggattatggtttggtgacggttgaagcagatgattatattttgatcaatagtgacggtttaaccaatatgattggcccagatgaaatcagagatattgtcttgagtgatgtttcactggaagaaaaagctcaaaccttgattcgttttgccaataatgctggaggcttggataatatcactgttgtactgctccactttactgaggaggacgcagcatgattcaaatcggcaaaatttttgccgggcgatataaaatcatccaacaaattggacgcggcgggatggcagatgtttatcttgcgcgtgatttgattttagatggggaagaagttgcagtcaaggtactgcgtacgaattaccagacggatcccattgcggttgcgcgttttcagcgtgaagcaaaggcgatggcagagctggaccatccaaatatcgttcggattacagacattggcgaagaagaaggacaacaataccttgcaatggaatatgttgcaggtttagacttgaaacgctatatcaaagaaaatgctcctttatcaaatgaagaagctgttcgtttgatggggcagatccttctagctatgcgtcttgcccatacgcgtggcattatccatagagatttaaaaccacagaatgtcctcttgacaccagatggaacagcaaaagtttcagactttgggattgcagtggccttcgcagagactagtttgacccagaccaactcgatgttggggtcggttcattatttgtcccctgagcaggcgcgtggttcaaaagctacagtgcaaagtgacatctacgctatggggatcattttctatgagatgttgacaggacacattccttatgatggagatagtgcagtcacaattgctttgcagcattttcaaaagccactcccatctattcgtgaagaaaataagaatgttccacaagctttagaaaatgtggtgatcaaagcgacagctaaaaaactgacggatcgctataaatcagtggcagagatgtatgtggacctttcaagttgcttgtcctacgagagaagaaatgagaaaaaactgatttttgaagatcaatcgaaagctgatacaaagactcttccaaaagtgagtccaactccaaagacggctcctgttccaatctctgaggtacgcagtgaaatcagttcggtagatcctaatcgaccattatctgatcagcagaccatggcgccaagtaaaaagccaagaagacgcttgcgggcgcgctacaaggtcttgtttgttgccattgccctagttcttgctgcctttactttcttgttgtatatgagcccagccaataaaacagttccagatgtttccggcaaaaccatagccgaagctagagcggttattgagggacaagaccttcaagttggtgaagagaaagaagagtacagtgattcggttgcagaaggttatgtcattcgaaccaatccaaatgcaggggctcaaaagaaagaacaaagtcgcattgatttgattgtttcaaaaggaccaaacagctttgaaatgccaaattacgtgggtgaaacacgggcaacagcagaggaagatctgaaaaatacttataaagtatcaagcaaaatgatcacgattgaagaagttgagaccttcgattatgctgcagggacagttcttgaacaaactccagctccaggaaagcaatattctctgaattcaaaaaccaagattgttttgaaagtagcgaaagaaacgacttcaattgaaatgccaaactatgttggatcaacttatgattttgctagaagtaatttgattgagatctatggtattaaagaagccaatatcgaattaagaaaaacagaacatctccctgatggagtatctgtttctgcaggtcaaattgtcagtcaaactccagaagtttcgagtacggtggatattaaccgaacacgaattgttttgactgtatatgagcctaaagtgacagcttcttcaagtacgaaagcctcatcaagttctgatacatctagttcatcctctggtgaacgttcagatacagaaagttcaagcagtagtgcaactagtggagattaataaatcagtctaagactcagatggatttctgggtctttttgattgtctgctattatccaaccacagacggaagtcaaatgaggaaaaatttgataaaataggaaaagatgaggtagactatgtggaaaatacaaatttttattttcgttgaagccgttttgttaacattagcagcgatcaccattttatcaatcgatttttccagatttgttgtcttgatggttctctttttgctccttttgtattactattttggcaaacaaaaagcgaattttctattaatcgcgctgagtgtgctcttgttttttatcgtgatgctgaatccttttgtgattgcagccattttatttgcggtggtttatggtttattgattgcttacccttatatgtataaggaaaatgaagccgttgtgtttgatgttgaagaggatacgaaaattcgtcaggaaaaaactcgatggattggtgatttacaacatttttcaaagcaaagtcgagggtatcgagatctgaatgtaatccgagtttttggaaatgacaccctccatttagaggaggtagccatttgcaattgggacaatgtagtgatcattcggaaaggttttggaaatacaaaaattatcttaccgattgatttggaattgcatttacaaattaacaccctgtatggagatctgaagtttttggatcttcctgtccgtaaaatgaggaatgaaaccatagacattgaaacggcacattatcggagatcgcaccgttctataaaaattgtgttagttggtattgttggggatgttgaggtgattcgcgcatgaagaaattagactatctcctattgtatttctattccctaatggtggttgcggtcatttgtcataccattttccattttgttggttttcagtggggcaaacttctttcagatctttccttgcttcagtcattcctatttttgggttttagtctgacgcttgcattgacggctttggttgtcttaattattaaaatcacgcaatttgtaacggttcatgcagtacaacaaaaggtagaagcgatcctgactgcttcacagcgaaaagaaattgcccccaaagaattgaatcaacagttagatttattggacagcaaattgcttcgactagaagaaaatttacaaaaaagtgaaaatcgtgtgatgcgaaatgaggaagaaattgtggaaatcgagcgtaagagaattgcgcgtgatctacatgacacggttagtcaagaattgtttgcagccaatatgattttatctggagtggcaacacaggcccttgagttagagaaaagtcagatccagcagcaactaaatggtgtgtcagatattctaggtacagcccaaaatgatttacgcgtcttgctcctacatcttcgtcctacagaattggaaggaaaaagtttggtagaaggtatggagatgatttttagagaattgaaggaaaagagtaacctaacagttgtcttccatcataatgacgtgagcattccaaaagaaatggaagaacatctatttcggatcgtccaagaaattgtcagcaataccttgaaacacgctagagctcaacaaatggatgtctttttgcatcaggaaggaaaacaacttcatttacggatggtagatgatggaatcggatttgagcaggaaaaattggaacgattgagttatgggttgaaaaatattcaagaacgtgtagaagacatggcgggaaccattaaaataagaacgagtcctcaaaagggagtggctgtagatattcgtgttcccctccttgtaaaagataaaaatgaaaaggaaactgtatgaaagtattattagtagatgatcatgaaatggtccgattgggattgaaaagctttttgtccatgcaaaccgatattgagcaagtcttagaggcacaaaatgggcaagaaggcgtggagttggcgttgaaagaaaaaccagacgtcatcatcatggatattgtgatgccagagctaaatggtatcgatgcaactctagccatcctaaaagagtggccggaagctaaaattgtcattttgacgtcttatttagataacgaaaagatttacccagtcttagatgcaggtgcaaaagggtatatcttaaagacttcgtcagcaactgagatcttacaggctgtcagaaaggttgcaaagggagaatttgcaattgagacagaagttagtcaaaaagttaagtcacgaaagaaccatgctgaattgcatgatgatttgacagctagagaacgagatattctggctttattgacgaaaggatatgaaaatcaacgaatagcagatgaactcttcatttctttaaaaacagtgaagacccatgtctccaacatcttatcgaaattagaagtcagtgatcggacgcaagcagtcgtctatgcctttcgacaccatctggtgaatcaagaagatttttaaaaggaaacatgctataatagagcgtgatcataagggggagacaagtggacgcaaaattacgttataaagccaaaaaagttaaaatcgtcttttttgatattgatgatacattacgtgcaaaagaaacaggattgatcccagaatctgtcaaagacgtcttccatcagttgaaagaaaaaggaatccgaacagggattgcaaccggcagagggatttttggggttgttcctgaaatcatggacttaaagcctgattttctagtaaccttaaacggtgcctatatagaagatacaaaaggaactgtgatctaccaatcaccaatcaatgaagcaatcgtttcttcttttgtagattgggccaaagaatccgagattgattatgggttagtggctagtcatcaagctgccctgtctaatcggacacccttgatcagtgatgctattgacatcatttatcccaacttacccgtagatccagatctgcatttgaaagaacctattttccaaatgtggacctttgatgaacaggatagtgagctagagttgcccccttctttgcaagaggacttgcgcctagtttcgtggcatccccattcgtcagatgttgttcgttttgaagcttcaaaagcttcaggagtttctcatcttgtaaatcatttgggcttgaagccagagaatgttttagtatttggggatggattaaatgatctagaactgtttgattatgctggaattagtatcgcaatgggaaaatctgccccagagttacaagaaaaagctgattatatcactaagaatttagaagaagatggcatattctatgccttagaggagttaaatatggttgaaaaagaattgacgttaccacagttagaacttgctacggctgacggtcctgtcgctgtgatcaaaaccaatcacggtaagatgaacattcaattgttcccggatcaagcgccaaaaacagttgcaaactttgtagctcttgctaagtctggttattatgatggtgtcattttccatcggattattaaagattttatgatccaagggggagatcctactggtacaggtatgggtggtgaatccatctatggtgagagcttcgaagacgaattttcaaaagaactgtacaatattcgtggagccctttcgatggcaaatgctggaccaaacacaaatggtagccaattctttattgtacaaaatcaacatctcccatattcgaaaaaggaattggtccgcggtggctggcctgaagaaattgctgaaatctatacgacagaagggggaactcctcacctagatcaacgccataccgtatttggacaattgatggatgaagcttcttttgctgtgttggatgagatcgcggctgttgagacagggatgatggataagccagtagaagatgtcgtgattgaaaccatcgagattgaggactaatatgaaaattggagataagttagaagggaccattacaggcattcaaccttatggtgcctttgtcgaactagagtcgggtgtcacgggcttgattcatatctcagagattagaagtggttatgtaagtaatattcatgatattctttcaattggagaaaaagtctttgtccaagtcatcgatgttgatgaatattctaagaaagctagcctctctctgagaacactagaagaaacaccacaacgaagtattcgacaccatcgtttttcaaatgaccgccacaagagtggttttgcgcccttagctcaacagatgccgacctgggttaaagaaggaaaggtattctttagcaaacaagaaaaaaaataaaaacttcgataggttgatgaaacctatcgaagtttttttgatatagagaattattcaaattcgtaaagggtagtagaaaggtaacgttctccattatctggtgcaagagcaagaacttttttaccgcttcccaattcttttgcgacttcaatagcagcatagatagcagctgcgcttgagataccgactaagaatccttcagctccaccgatagcgcgcgcaagttcgaaagcttcttctgaagatacgcgacgaacaccatcatatgcattagtgtctaaagtatttgggataaaaccagctgaaatcccttggattttatgtggtccaggtttttcgccagaaaggactgcagattcattggcctcaacggcatagactttgacagcaggattattctttttcaaagtatgagaaataccagaaacagtaccaccagtaccaacacctgcgacaaaagcatctaaaccatcttttccaaaggcatcaacgatttcttgtcctgttgttctttcatgtacctctgggttagcagggttttcaaattgaagaggaaggaagccattcctttctgcagcgattgcttcagctttagcgatagcgcctttcattccttcacttccaggagtcaaaacgagttcagctccataggcttggatgattttacgacgttccacactcatggtttcaggcatgacaatcacaactttgtagcctttagctgcgccaacccatgacaagccaatccctgtgttcccactagttgcttcgacaatggtatcacctggtttgatcaagccatccgcttcagctttttcaatcatgctcaaagcaatccggtctttgacagatgatccaggattgaaggcttcgagtttgacatagacatctgcagctccttcaggaacaagacgattcaatttgacaatcggagtgttcccaatcaattctgtaatattttcataaatagccataatatacctcagttctaggttttcttgatactaacaagtatagtcccttgcgggaagaatgtaaaatatagaaattttatgggtgtgataaaaaaaaactatcgttgccgatagttttttaattatttttctacagaaagtagggggacttcaacctcgcgaattccttgatcctcaataatgactttgccattgtaaaattcgactaaagctgctgtgatagagtttgtgttttctttatccacaaaaatagttgtcatcacctgatctgtgaacattggatcttgttccgccaattgatggtcttttaagaaattagcaaattcttggtattgggaataagaaagtgtgatcccaagaaccacttgctctttgatttctaccagtccaatttctcgaactgcttgtgccacacttccagcataagcacgaattagaccgccagcacctaatttaatacctccaaaatagcgtgtaaccacgacacaactattagtgatgcgatgattctccaaaactcctaacatcggtaccccagctgttccgctaggctctccatcatcactggtccgtttgatatcactttgttctcctatgatgaaagcagagcagttatgtgtagccttatagtgttcctttttgatggcattgataaaatctctagcttcctcttcagaggagactcgcttgacatgacaaatgaattttgattttttgatttcttcttgaacagtaccgttctctttaaatgtaacatattccatattcttattttacaaaaaaagaatgattttctccaacttttgcgaattaataagtatgaagatagaagattcttatggaagactcttgacggagagtcaaatgacgaatgatctaaaagaaattgcccaagaacttccagctatagaaaaacagaatggaaggtaccaatgctttcgatgtggcagtttgattgatcaaaaactgtggaagttgagtgaagaggtactgtattgtagagcctgtatccaattggggaggatccggagtgatcaaaaactttatgctattggacagcaagactttgaaggtcaagaggtgctaaaatggaaaggagccttgacttcttatcaacaagaggtatctgaaggacttatccaagcagttaaagcagggaaacatgccttggtacatgctgtgacaggagctgggaaaacggaaatgatgtaccaagttatagcaacagctatcaaggcaggaaaagcagtctgtattgccaccccaagaatcgatgtctgtatagaattgtacggaaggatgaaggaagacttttcctgccccatcactttgcttcatggagaatcggagccctattttagaacacccttggtgatcgctacaacacatcaattgctaaagttttatcaggcctttgatctccttattatagatgaagtagatgcttttccttatgtggacaatccaatcttatataaagcagctcagaatgcgataaaaaaagaggggaacaccctatatttaacagcaacttctacagatgagttggataaaaaggtcaagaaaaaagaaatcattcgttatagtcttccaagaagatttcatgggaacccactagtggtccctgaaataaaatgggtgccgaaaattagagaaaaaatagaaaaaggaagaatcccttacgaactattgcaactgattaagaaacaaagaaagactcactacccattgttaatctttgtatctgaaatagaattaggacaacaattcactgaggacttaaaaaaatactttcccaaagaaacagtagtttttgtatcctcacagacaacagaccgtctacgaatggtagaagagtttagaaacagagccataaccatgctagtctcgacaacaattttagaaagaggagtgacttttccgtttgtagatgtctttgttctagaaagtaatcacaaattatttactaaaagtgctctcgtacaaatttcaggaagagtcggtcgaagtaaagaaagaccaacaggtaaactactttttctatcagatggcataacacgagaaatgaagaaagcgatcaaagaaataaaggaaatgaatcaggaggctggattttgaaagaatgcttgctttgtactaaagagttgaaaactggtgaacatttcacagaccttatttttatgaatcaacaagaagaatggatttgtaaagaatgcaaagaagacttcgaacaaattggcgaaatccattgtcctagatgttataaagataaagaggagaaagtatgtaaagattgcgaatactggatacaaaaggggaatatagtagaacatgaagcattatatagatataatgcagcaatgaaggactatttcaagcgatataaatttgaaggagatcgtttattaggaatggtatttgcatgtgacatcaaaaaagccttgaaaaagtataaaagctatacgataataccgactccaatcagccatgaaaaaaagcaggaaagaggattcaatcaagtatcgactatattagattttgcagaaataaagtacagcagtctcttccaaaaagaagacagcttagcccaatcaaaaaaaacaagagaagaaagattaaaaacctctcaacactttcaattaaaagaagaggtttcaaaaaagcagaaatatcttatctttgatgatatctacacaacgggcaaaacaatcgaattaatgaagcgcctactaattgaaaaaggtgtgaaagaaataaagacattttcaatcgcaaggtaaaaaaagatttgcaaaaactttatgaaagcgttataatatacatataaataaaaacataatgtttagaaagtaggtactaatatgattaaatatagtatccgtggtgaaaacctagaagtaacagaagccattcgcgactatgtcgtttctaaactcgaaaagattgaaaaatattttcaggcagatcaagagctggacgctcgagtaaacttaaaagtttaccgtgaaaaaaccgcaaaagtagaagtaaccattccgcttggatctattacactgcgtgcagaagatgtctctcaagatatgtacggttcaattgatctggttgtagataaaattgaacgtcaaattcgtaagaataaaacaaaaattgaaaagaaaaatcgtgttaaatctggtgcaggtaaattgtttaccgatgcagttgtagaagaagcagcaaccacagaaaaagttgttcgctcaaaaacaattgatctagaaccaatggatttagatgaagcgatccttcaaatggatctattagcacacgatttcttcatttatcgtgatgcagaggataacacaacaaatgtgatctaccgtagagaagatggagacatcggtctattggaagtaaaagaatagagatcaaaaaaagagattgaaaacatcaaataaattatagaagaatcaggagcatctgtgctcctgattttttatataactaaaaaactttcaaaaaaataaaaaatttttaaaaaaagtattgacagtaaggtaaggtcatgatatactaatatagttgtcgcgcgagagcgacaaagacctttgaaaactgaacaagacgaaccaatgtgcagggcgctataactaaggttatagtaactgaacaataaaaaaacaataaatctgtcagtgacagaatgagtttaagacaaacaattattttaatgagagtttgatcctggctcaggatgaacgctggcggcgtgcctaatacatgcaagtagaacgctgaagcttggtgcttgcaccgagcggatgagttgcgaacgggtgagtaacgcgtaggtaacctgcctcttagcgggggataactattggaaacgatagctaataccgcataaaagtcgacatcgcatgatgttgacttgaaaggtgcaattgcatcactaagagatggacctgcgttgtattagctagttggtgaggtaacggctcaccaaggcgacgatacatagccgacctgagagggtgatcggccacactgggactgagacacggcccagactcctacgggaggcagcagtagggaatcttcggcaatgggggcaaccctgaccgagcaacgccgcgtgagtgaagaaggttttcggatcgtaaagctctgttgtaagagaagaacgagtgtgagagtggaaagttcacactgtgacggtaacttaccagaaagggacggctaactacgtgccagcagccgcggtaatacgtaggtcccgagcgttatccggatttattgggcgtaaagcgagcgcaggcggttagataagtctgaagttaaaggctgtggcttaaccatagtacgctttggaaactgtttaacttgagtgcagaaggggagagtggaattccatgtgtagcggtgaaatgcgtagatatatggaggaacaccggtggcgaaagcggctctctggtctgtaactgacgctgaggctcgaaagcgtggggagcaaacaggattagataccctggtagtccacgccgtaaacgatgagtgctaggtgttgggtcctttccgggactcagtgccgcagctaacgcattaagcactccgcctggggagtacgaccgcaaggttgaaactcaaaggaattgacgggggcccgcacaagcggtggagcatgtggtttaattcgaagcaacgcgaagaaccttaccaggtcttgacatccctctgaccgctctagagatagagttttccttcgggacagaggtgacaggtggtgcatggttgtcgtcagctcgtgtcgtgagatgttgggttaagtcccgcaacgagcgcaacccctattgttagttgccatcattgagttgggcactctagcgagactgccggtaataaaccggaggaaggtggggatgacgtcaaatcatcatgccccttatgacctgggctacacacgtgctacaatggctggtacaacgagtcgcgagtcggtgacggcaagctaatctcttaaagccagtctcagttcggattgtaggctgcaactcgcctacatgaagtcggaatcgctagtaatcgcggatcagcacgccgcggtgaatacgttcccgggccttgtacacaccgcccgtcacaccacgagagtttgtaacacccgaagtcggtgaggtaaccatttggagccagccgcctaaggtgggatagatgattggggtgaagtcgtaacaaggtagccgtatcggaaggtgcggctggatcacctcctttctaaggaaatggaaacctgtacgttggtcttgtttagttttgagaggtcttgtggggccttagctcagctgggagagcgcctgctttgcacgcaggaggtcagcggttcgatcccgctaggctccattaacactgtaagggtgttaagattgaacattgaaaattgaatatctatatcaaatagtaacaagaaaataaaccgaaacgctgtaaatatttaaagagtttaggtcgcaagaccaaaataaggttaagttaataagggcgcacggtggatgccttggcactagaagccgaagaaggacgtgacaaacgacgaaatgctttggggagctgtaagtaagcgacgatccagagatgtccgaatgggggaacccactagctaatggctagtactcctatctgttaaggataggtagaggaagacgcagtgaactgaaacatctaagtagctgcaggaagagaaagcaaaagcgattgcctgagtagcggcgagcgaaacggcaggagggcaaaccgaagagtttactcttcggggttgtaggactgcaatgtggacttaaagaatatagaagaatgacatgggaaggtcagccaaagagagtaagagcctcgtattcgaaatagtctttatacctagcagtatcctgagtacggcgggacacgagaaatcccgtcggaatctgggaggaccatctcccaaccctaaatactctctagtgaccgatagtgaaccagtaccgtgagggaaaggtgaaaagcaccccgggaggggagtgaaatagaacctgaaaccgtgtgcctacaacaagttcgagcccgttaatgggtgagagcgtgccttttgtagaatgaaccggcgagttacgatatgatgcgaggttaagttgaagagacggagccgtagggaaaccgagtctgaatagggcgtcttagtattatgtcgtagacccgaaaccatgtgacctacccatgagcaggttgaaggtgaggtaaaactcactggaggaccgaaccagggcacgttgaaaagtgcttggatgacttgtgggtagcggagaaattccaaacgaacttggagatagctggttctctccgaaatagctttagggctagcgtcgacattaagattcttggaggtagagcactgtttgggtgaggggtccatcccggattaccaatctcagataaactccgaatgccaatgaattatggtcggcagtcagactgcgagtgctaagatccgtagtcgaaagggaaacagcccagaccaccagctaaggtcccaaaataattgttaagtggaaaaggatgtggggttgcacagacaactaggatgttagcttagaagcagctattcattcaaagagtgcgtaatagctcactagtcgagtgaccctgcgccgaaaatgtaccggggctaaaacaatttaccgaagctgtggatacctttataggtatggtaggagagcgttctatgtgtggagaaggtgtaccgtgaggagcgctggaacgcatagaagtgagaatgccggtatgagtagcgaaagacaggtgagaatcctgtccaccgtaagactaaggtttccaggggaaggctcgtccgccctgggttagtcgggacctaaggagagaccgaaaggtgtatccgatggacaacaggttgatattcctgtactagagtatgtagtgaaggagggacgcagtaggctaactaaagcgtgcgactggaagtgcacgtctaagcagtgaggtgtgaattgagttaaatgcttaattctataacattgagctgtgatggggagcgaagtttagtagcgaagttagtgacgtcacactgccaagaaaagcttctagcgttaatcatactctacccgtaccgcaaaccgacacaggtagtcgaggcgagtagcctcaggtgagcgagagaactctcgttaaggaactcggcaaaatgaccccgtaacttcgggagaaggggtgctggctttcagtcagccgcagtgaataggcccaagcaactgtttatcaaaaacacagctctctgctaaatcgtaagatgatgtatagggggtgacgcctgcccggtgctggaaggttaagaggagtgcttagcgtaagcgaaggtatgaattgaagccccagtaaacggcggccgtaactataacggtcctaaggtagcgaaattccttgtcgggtaagttccgacccgcacgaaaggcgtaatgatttgggcactgtctcaacgagagactcggtgaaattttagtacctgtgaagatgcaggttacccgcgacaggacggaaagaccccatggagctttactgcagtttgatattgagtgtctgtgccacatgtacaggataggtaggagccattgagatcgggacgccagtttcgatggaggcgttgttgggatactacccttgtgttatggccactctaacccggtaggttcatcatctacggagacagtgtctgacgggcagtttgactggggcggtcgcctcctaaaaggtaacggaggcgcccaaaggttccctcagaatggttggaaatcattcgcagagtgtaaaggtataagggagcttgactgcgagagctacaactcgagcagggacgaaagtcgggcttagtgatccggtggttccgtatggaagggccatcgctcaacggataaaagctaccctggggataacaggcttatctcccccaagagttcacatcgacggggaggtttggcacctcgatgtcggctcgtcgcatcctggggctgtagtcggtcccaagggttgggctgttcgcccattaaagcggcacgcgagctgggttcagaacgtcgtgagacagttcggtccctatccgtcgcgggcgtaggaaatttgagaggatctgctcctagtacgagaggaccagagtggacttaccgctggtgtaccagttgtctcgccagaggcatcgctgggtagctatgtagggaagggataaacgctgaaagcatctaagtgtgaaacccacctcaagatgagatttcccatgattttatatcagtaagagccctgagagaagatcaggtagataggttaggagtggaagttgtgtgagcaatggagcggactaatactaatagctcgaggacttatccaaagagtcagaagatattgacaacgtgagtttaacttgttagaatatagatgttcaattttgaatgtttaatcattcagagttaagtgacgatagcctaggagatacacctgtacccatgccgaacacagcagttaagccctagaacgccggaagtagttgggggttgccccctgtgagataaggtagtcgcttagcaagagattgagcctagtagatactaggctcatttgggagtttagctcagctgggagagcatctgccttacaagcagagggtcagcggttcgatcccgttaactcccataggtcccgtagtgtagcggttatcacgtcgccctgtcacggcgaagatcgcgggttcgattcccgtcgggaccgttaagataatgaaaattattttaagactcgttagctcagttggtagagcaattgacttttaatcaatgggtcactggttcgagcccagtacgggtcatattttgcgggtttggcggaattggcagacgcaccagatttaggatctggcgctttacggcgtgggggttcaagtcccttaacccgcataagagaataataatgagccggcttagctcagttggtagagcatctgatttgtaatcagagggtcgcgtgttcaagtcatgtagccggcatttttttatataaagaaagcaatgcgaacgtagttcagtggtagaacaccaccttgccaaggtgggggtcgcgggttcgaatcccgtcgttcgcttgaggaggccggggtggcggaactggcagacgcacaggacttaaaatcctgcgattggtaacgatcgtaccggttcgattccggtcctcggcatagacaaaggttgaaagaagcacccttagctcaactggatagagtacctgactacgaatcaggcggttagaggttcgactcctctagggtgcatggtcgcaaggctatgtaataattgaataggaacgagcacccttagctcaactggatagagtacctgactacgaatcaggcggttagaggttcgactcctctagggtgcataaagcggtagctttagatcgggaagtagctcagcttggtagagtacttggtttgggaccaaggtgtcgcaggttcgaatcctgtcttcccgatagtgtattgaaaaagtctaatgattgtcattaggctttttttgtagatgattttcttatttctttacaagaaaaaagagcttgcgctctttccaactttatttatttcgcagttcaacataacggttataccaaattttgatatattcctcagaaaaaggacctttgttttggtttatccaatctactagaaccttaacattttcctttaaaataaagtcgatgtcatctgaatagtgcattttttctttatgctgctcgtattcttcaacatctaacaattttttttcaccattcgtaaaaaccttgacatcgagatcatagtcgatatattttaaggcttcttggtcaatataaaaaggacttgctaggttacagtagtaagacacaccattgtcacggatcatggcgatgatgttaaaccaatattttttatggaaataaacgatcgctggttcacgcgtgatccaacgtctaccatcactttcagtaacaagtgtatgatcatttactccaataattgcattttcggttatctttaataccatggtgtcacgccatgttcggtgtaaactgccatcatgtttataactttgaattgtaataaagtcgccttctttaggtagtttcataacttaccaactttctacaatctaagtatatcctctatattgtaacatattttttcaaattttttcttatttttctatttaattttcaatttggtttatgaatctaagtattctctaatggctgacgttatatcactataatcgtagccttttctggctagtgcctgagtcaagcgttgtttgaggtcatagccttcatattttttactgtatttacggtattgcttttctaactcttttagaatgagctcattggttgtttcttcatctgtttcgggctcgagattttggaatgctatctttgcttgattgtaagcaaaaccttttgaaatgagtgcttggatgattttcgtttcaatggcttttaacggatattttccttggtatttttttaggagttttattgcggtacggtcgatcacttctgaaaaatcatagtctgcaagaatttcttgaaggatagattttgggatccctttttgttgaattttttgttctaataagagaggacccttatcgccactgagaaggttggcttctatcaggtttcttgcatattgacgatcatctaaccacttgtcttcctttaggtgttggaccactttatcaataatgccactttcaatctcatactttgacaggtagtctctgacttcttttgttgtccgagctttaaaagaaagatggtaaagggccaggtttttaccataggagtattgagcaaactcttggatttcttttagttcttcttcactgatttctttatctttggaaaggaaatatttgacgatggtgtcttctgtaatataaagtttttgatcattgtctaattctaggaggtagagtctttttttcttttctagttttgtaattttcatgtttttattataccgaaaaatgtgttaagatagggatatgaacgttaaagtaaaacaaaaaattcctttgaaaattaaacgaatgggaattaacggagaagggattggcttttataaaaaaacacttgtctttgtgccaggtgccttaaagggagaagatatcttctgccaaattacaagtgtcaagaaaaattttgcggaagccaaactcctatctgtgaataaggcgtctaagtttcgtgtgacgcccatgtgtgatatctatgagacctgtgggggctgtcaaatcatgcatttgaagtatgacaagcagctggagtttaagacagatttgttgcaacaggccttgaagaagttctcacctgaaggatttgaacagtatgatattcggccgacaatcggaatgcaggagcctctttactatcgtgcaaaattgcaatttcaaacaaggaaattcaagggccaggtgaaggcaggactctatgctcaaaattcacattatttagttgaattaaaagattgtttagttcaagatccggttattcaagcgattgccaacgatctagcggatttattgacctattatcagattccgattgctgatgaacgaaaagaactgggtgtcagaaccatgatggttcgacgggctcggaagtccggtcaggttcagatcattgtggtcactagtcgtcagattaatgtaaacaatttggtgcaagacttggtcacgaaacaccctgagattgtcacagttgctgttaacaaaaatacgtctcgttccagtgagatttatggggaacaaacgcagattatttggggagaagaggccattttggaaggtgttttggattatgaattctccctgtctcctcgagccttttaccagttgaatccggaacaaactgaagtattgtatagtgaggcggttaaggctctagatgtttcttcagaggatcacttgatagatgcttattgtggggttggaacgattgggtttgcttttgctaatagagtgaaaagtgttcgggggatggatattattcctgaagcgattgaagatgccaaatacaatgctaaacggatgggatttgagaatacccactatgaggctggtacagcagaagagatcattcctcgctggtaccaagaaggctatcgggctaatgctgtgatcgtggatccacctcgtacgggcttgggtacaaaattaatcgagaccttgttgcagtatgcacctgaaaagatggtctatgtctcttgtaatgtctctaccttggcacgggatctagtggctttgacaaaggtttatcaggttgaatacattcaatcagtggacatgttcccccatactgcaaggacagaagcagttgtgaaattagtgaagaagtgaaagaagaatggatatttgggaaaaactttatcatgaggcgaaagctctctatgcgcctcatgaggtttcagattttgtctatgctcgacatgtggttgctgctgttgaggctgcagatggtcagatttttacgggcttttgtatggaaggaacctgcggcgtctttcatttatgtgccgaacgagcagctctcttcaatatgtatcaacaatcaggacagacaaaggtcaagcgcattattgcttttcgagacaaacctccttatggagaaggttctgggatgccttgtggggcctgtcgtgaatttctccttgagctagatgcagagaatcgtcatctagaatttatggtggattatgagagccgcaagaccattactttaggtgaattgatgcccctttggtggggcgaagaacgggctcgtcaaagagaaaataaagggaatgagtagaggaaataaataaatgaacaatgttattgatgtatcgattccagttgctcaagtcattgatcaacatccggaagtattggatttgttggtggagttgggctttaaacccttagccaatccgatcatgcgcaatacagttgggcgcaaggtttccttgaaacaaggatcaaaattagaaggtactcctatggagaagattgtgagaacactagaggctaatggctatgaagtagtggggctagaccaatgagtgatgaacgaattcacgtcttaagagatatcttattagagcttcatcatggagcttctcctgagtctgttcaggagcgctttgatgcgacctttgcaggggtttctgcgattgagatctctcttatggagcatgaactaatgaattcagatgcaggtgttacttttgaagatgtgatggagctttgtgatgtccatgctaatctctttaagaatgcggttcaaggggtcgaagtagcagataccgaccaccctggtcatcctgttcaaatctttaaacaggagaacttagcccttcgtgcagctatgatgcgggtccgccgcttgctagacaattatgagacgactgaggatcctgagatgattcaggagattcataagggcttgttacgtcagctgggcttggtgggtcaatttgaccggcattaccgtcgtaaggaagagttgatgtttccgattatggaaaaatatgggcatgattccccgccaaaagtgatgtggggagtggatgaccagattcgggaactctttgcgaaagttttggatgcggccaagaaattaccggattctagtatcttagaagtcaaagagctctttgaagcctttgcgcaagagtttgagggcatgatcttcaaggaagagtcgatcctcttgatgattttgctggaggcctttacccaggatgactggctctccattgcagaagaaagtgatgcttatggttatgccattattctcccaagtgagaaatgggtgccgaaacgcgtggacttcaaggaggaagcgtctgaagagtcagaaggttcaactgaatcgattccttctttaaaaggcgatgagcaccgtcaggtcattgagactcctgaggggcagttgacgattactttcacgcctaagaaaaaagaagagagcttcgatcgcaagcaacctcaaccgtttggtaatggctatttgtcagtggagcaagcgaatttaatcttgaaccagttaccaatggagatcacctttgtcaataaggatgatattttccaatattacaatgatgctgcgccttttgaggaaatgatttttaagaggacgccatcgcaggtaggacgcaatgttgagctgtgtcacccaccgaaatatttggataaggtcaaagccatcatgcaagggcttcgtgaagggaaaaaagacaagtatgaaatgtggttcaaatcagaatcgcgtgggaaatttgtccatgtcacctatgcagccgtgcgtgatgaagctggagactttcaaggtgtcttggaatatgttcaggacattcaaccttatcgggagatcgatacggatttttatagaggaatggagtaaagatgagttacgaaacagagtttatgaaggagtttgaggagtggatcaagactcaagtcatgatcaatgaaatggctctcgaagaaagtaagaaggtttttgatgaagatcaggatgaacgagctaaaatcgctatgattcgctatgaaagccgtttggacgcttatcagttcttgcaagggaagtttgaaaatttccatgctggaaaaggatttcatgatttaccagatggcctttttggtgaaagaaaatattaaaaataccttattgaaggcgtttaactagctagatttacctgaaaattgagcaatgacttgattttttaggggattgtgatacaataaaaaagttgaaatgacatcaacggatttttgaatggaattatggtgatgaaaccttgttgccttaggaattgatcactgaatttaggaggaaaaatggcaaagaagaacgtaaaccgtgcgaaacaatacaaacatcaaaatagacatcttttgaaaaaagctgtcgcaactgtaactgcagctataaaagaagcacctaaaaaggtagaaaaagctacaaaagcagtggcgaaagaagtgaaacaagcggcttcttcagtggaagaatttgctgcaagtttggaaggtgtggcacttgatcgtgcgcaaacattctatgatgaaggtattcgctctgttgcagacttcgcaaactggacagaaaaagaactccttgctttgaaaggaatcggtccagctacaatcaagaaattgaaagaactaggcgttaaatttaaataatcgcttttatgatttcttgctatttccaggaaaacttgctaaaatgaacctattagaggtgttttgaatcccacattttacagaaagtggcggtactgagaagtccacaaatgtgtcaaaactggttgctaatggatgaaaatgaaatattaaatagtctttttgttttaaagacgagagatgcgggcatctgcccgaaattgggtggtaccgcggattaatacattcgtccctgtcagattgatgacaggggcgatttttctttttgcaaccctggctgaaggagcttgtcatgaaacaatcttttaacactagtaaactctactatggctttccgattttcatcttggggtatcaggaccagaactttgggtacaatatcacgacttgcagttcctcttatagcttgggagattggctggtcatcggtgttggtgctgaggaaaatgcggctgaccagattaagcattatcaacagttcagcgtgaacatccctgacgaaaatctcatgctccagatggagcaggctggctttatcagccatcgggagaagttggaacacctagggctagactacgagatttctgaacggactcaggctccgattttagaagcttgtccagtcgttttggattgccaggtggatcggattattgaggaagatggcatctgtcatatttttgccaagattctcgaacgactggctgctccagagctcttagatgacaaggggcattttaaaaatgaccgttttgcgccgacttactttatgggggacggccatcagcgcgtttaccgttatctagataaccgagtcgaccccatgggaagctttattaagaaagcgaggaagaagaatgacaagagcaacattacctgaacgaatcgaaacggagcgtctggtcttacgagtccgtacagtggcggatgctgaggacatccatgcttacgctagtcttccagaagtctcttacccagcaggttttccacccgtcaagaccttggaagacgagatatattacctagagcatattcttcccgatcgcaatcaaaaagaaaatcttccagctggttacggcattgtggtcaaaggaaccgataaaatcattggctctgttgacttcaaccatcgccacgaagacgatgtgctggagattggctataccttgcacccagactattggggccggggttatgtacccgaagcagcgcgtaccttgattgacctggcttttaaagaactagggcttcataaggtagaattgtcttgctttagctacaatgtccaaagtcaacgagttgctgagaagcttggtttcacccttgaagcacgcataagagaccgtaaagatgctcaaggtaaccgctgtgacagtctgatatatggcttgctgaagagtgagtgggaagattcaataggtgattttgagtggaaaaaataattgtagattggattattactttaagttttggatttttagtttattatttttataaaactcgtaaaaagaaaaaagttacttctgatatttctaaagaagtggctcctgcgaaaaattctgaaatatcggaaagtaatagtaattttttatctctaatgcctatatttgagattttgccagaagacgtaagtgttgaagaggacaaagtacatgagatttctgacgaaattgttatcaatagacttaataagttagttccccaaatagttaatggctacaagcagttcgctgataaaaaagttgttgagcatataaaagaaatagaaaatacaaagctctatcagatcattattccagaaggagcaaaactttataagtccaaagatttagctggagcttttaggggtggatatagtgtgaatggtcagcttgctggtcaagcaaatctagtgccagttaaaattgataatgctagagaccttagttcaatggctgatacaactgcgactgtaatgaatgtagcttcgttggttgtaggacaatattatatgtctgaaatcaatgataaaatggaaaagatgcttggaaacctggataagatagctgactttcaacaaatggagtttaaagctagaattttagctttgattagcaaagtagggaaaatttctcagtttaatgcggagatcattgaaaatgaagaaataagaaaacgaacactagacaatctaagtcgacacgaggatgaagccactgaactactacaacaggttaatttatcaattgaacatctagtttctaagaatacgagtaatgattttgaacaatataaagagaacacttatgaatttgataaactaataacttatcagcaatatttactttcaattttagaagaaattggacgtttagtctacttactgaatatggggatgatatcttccgaatattgttattcatcttttaataattatataaaacaatctactggagcaagaaatcaacttgttaattggcataagaacaatatcaaacaatttgaaattgatctaaagaaaaagaggtatgctaagcaagggatagaagcaatcttttttacaccagcaacatggtttagtaatgaatggaaatacaatgaattatcaaaatcagttgttgctaaaatagaaaatcagtcatctaattcactcaattttaaaaatttaacaaatgatttattgaataaagagacaaagattatttctaaaaatggcaaatattattatttaacagaataaaaggagaacacacatgtctaaagaactttcacctaaatacaatccagccgaggttgaggctggtcgttaccaaaaatggcttgatgaagatgttttcaagccttcaggcgataaaaaggctaagccttattcaatcgttattccaccaccaaacgtaactggtaaacttcaccttggtcacgcttgggatacaactttgcaagatatcatcatccgtcaaaaacgcatgcaaggttttgatacgctttggcttccaggtatggaccatgctgggattgccactcaagctaaagtagaagcgcgtttagctgaggacggcatctctcgttacgacctcggccgtgagaaattccttgagaaagtctgggaatggaaagacgaatatgccactactatcaagcaacaatggggtaagatgggactctctgtagactactctcgcgaacgtttcacgcttgacgaagggttgtcaaaagctgttcgtaaggtctttgtagagctttacaagaagggatggatctaccgtggtgaatttatcatcaactgggatccaaaagcccgtacagccctttctgatatcgaggtaattcacaaggatgtcgaaggtgccttctaccacatgaactacatgttggaagacggttcacgtgcccttgaagtagcaacaacacgtcctgagactatgtttggggatactgccgtagcggttaacccaaatgatgatcgttataaagacttgattggtcaaaatgttatcttgccaatcttgaacaagccaatcccaatcgtaggggacgaacacgcagaccctgagtttggtactggtgtggtgaagatcactcctgcccacgacccgaatgacttcttggttggtcaacgtcataatcttccgcaagtgaacgtcatgaacgatgatggtactatgaatgaattggctggtgaattcaacggtatggaccgctttgaagctcgtaaggctgttatcaagaagttagaagaaattggtgcccttgttaagattgagaagatgacccactcagttggtcactcagagcgtacaggggttatggttgagccacgcttgtctacgcaatggttcgtcaagatggaccaattggctaagaatgccattgccaaccaagacacagacgataaggtagaattctacccacctcgttttaacgacaccttccttcaatggatggaaaatgtccatgactgggtaatttctcgtcagctctggtggggtcaccaaatccctgcttggtacaatgctaagggtgaaatgtacgttgccgaagaagcaccagaaggtgacggatggaaacaagacgaagatgtcttggatacttggttcagttctgccctttggccattctcaactatgggctggccggatgtcgactcagaagacttcaaacgttacttcccaacttcaaccttggtaacaggttacgatatcatcttcttctgggtatctcgtatgatcttccaatctttggaattcacaggccgtcagccattccaaaacgttctgattcacggtctcattcgtgatgagcaagggcgtaagatgtctaagtcactcggtaacgggattgacccaatggatgtcatcgagaaatatggtgctgatgccctccgttggttcctttcaaacggttctgcaccaggtcaagacgtgcgtttctcttacgagaaaatggatgcgtcttggaacttcattaacaagatttggaacatctcacgttacatcctcatgaacaatgaagggttgaccttggatgcggcacgtgaaaatgttgccaaagtggctgctggtcaagcaggtaatgttacagaccgctggattctccacaacctcaacgaaacaatcggtaaggtcactgaaaactttgacaagtttgagtttggtgtagctggtcacatcctctacaacttcatctgggacgagtttgcggactggtatgttgagttgactaaggaagtgctttacagtgataacgaggacgaaaaagtcatcactcgttctgttcttctttacaccttggatcaaatcttgcgtctccttcatccaatcatgccattcgtaactgaagaaatttactgccaaatctctgaaggcacgatcgtgactgcggaatacccagtggttcgtccagagtttgaaaatgaagaagcagcagctggcgtcgaagctcttaaagacgtgattcgttcagtccgtaactcacgtgcagaagtgaacgtagctccaagcaaaccaatcactatcttgattaagacaagcgacagcaagctcgatgccttcttcaatgacaacgtcaactacatcaaacgcttcacaaacccagaacacttggaaattgcagcagatgtcgaagtacctgacttggttatgtcaagcatcatcacaggtgcagaaatctacttgccactcgctgaccttctcaatgtcgaagaagaattggctcgtcttgaaaaagaattagccaaatggcaaaaagaactggatatggttggcaagaaactctctaacgaacgcttcgtagccaatgccaaaccagaagttgtccaaaaagaacgcgacaaacaagccgactaccaagcgaaatacgacgcgaccgttgcgcgtattgatgagatgaagaaactcgtgaaataaacacagaaacacggcggtatgccgtgtttttttggtataatgaaatcaatatctattgatggagaaagttatgtctaaacaccctcactatgaattgttaaacttaattggctatggtcttgctaagtttgatgatacttttataaaggaatttcaatgctctagtaaatccgagttttatcgttacatagtttctttaggcgttgcagaaacaactggtgtcgtcaaaaatagaatggatttattcgacccctattttgataacaatcgaaaaggttggtggcaaaaagctgaaatctaccgttttcgaaaagatttaattgacacgatgtttggaaatgaggatgttcacagttttgcagaaatagtcaaaatgctgcttgcaagcgaagggaagaaaacaggtataaccatcattgaaaagccaattgttcggacgaaattcaaacgcctacaagaaacgggaatggaagcagagaactatttcatacaccattttgataaggaagaaaaatttcaaggtggccaattgaccgatgcccgtctttatggtgatggatatgatttccaagtagatgttcaagaacattcataccttgctgaagtgaaaggtattcgaaaacctaaaggacgtattcggttgaccgccaaagaatttgagaaagctaaggaatatcaatcagattttattctgtctctagtcaccaatctcgacgatattccaaaattggtattgattgataacccacttaaccattttgaatttgaaaaaaatgttattaagaatgaagtcgttgaatatagaagtttggaagatttatattaataaatagtgcggtgtttattaatatcacgtcgactggcaaaagcttattttagactaaatggcgtataaaaatcttttcatattgaccaaaaacaccacctcctagtcaattaaggaggtggtgtcatgttttaaaccattttccagaaataatcgatgatataggtcaggccgtaggtgtagatgacgagggtgatgggtttacagaggatgatgatggtcatgtagcgtttgaaggtcatattggtcagacctgctagcatacagatgaagtcggcgggactaaccggccagatcatcatgaagataaagaagcgatcgaaccgcttgccttcattgagccagccaatgtacttgtcgtaggtcttctgattgaccatggattggacgaacttaggcccgtacattctcgcaaggtggaaaataatggcacagccaatcacgatgccgatgtaattgtaaatggtcccaatgatgtgaccgtagatgaagacacctgctacagatgtcagggcgccgggaataatagggaccactgtctgaaggatctgaagaaagataaagagaggtggtccaaaaatacctgcttgcaaaataaaggcagacagagtttccttggattgaaggatgccagcaaagtaggcccagatacaaaaggccaaggtcccaagagctccaatgatggacgaccaattaatgatgcgctggagaagaggagagacctcttttaagcttgtttgtttcataaaaaattccgagttctttttcttctactataccatgtttttggaactttgtaaggattttgtctattttttgagtagtgaaagcgacctgatcggagtctgtcgctgttttagtcgtgaagcgggtgcaaaatgggcctttttatgctacaatgaaaggagtataaaaaatggagaaaaacgtgtcaatcgaaaattacaaaccagattttgcggtggaagcagcctatgatctcaccgttgcagacttgaaaaaacagggtatcaaggcggtccttgtggatttggataataccttgattgcttggaataatccggatggaactcctgagatgcgccagtggttgcatgaccttcgtgatggagggattcgggttatcgtggtgtctaataatagtcccaaacgggtcaagcgcgctgttgagaaatttgatattgactatgaagcctggtcgcttaagccctttacctttgggattgatcgtgccctcaaacgtttccactatgagaaaaatgaagtggtcatggtcggggatcaactgatgacggatatccgagctgcccatcgtgcaggcattcgttcgattttggtcaagcctttggtcgagcatgactcgatcaagacgcagatcaaccgggcgcgtgaacgccgtgttatgaagcaaatggccgaaaaatatggtccgattgtatacaaaaaaggaatttaagaatggaagaattattctgtattggctgtggagcccccattcagacagaaaacaaagaggggctaggctatactcctcaatcagctcttgaaaagggcttggaaacaggtgaagtctattgccaacgctgtttccgtctccgtcactacaatgaaatcactgatgtgcatctgacagatgatgatttcctaaaactccttcacgaagtaggagatagtgatgctctcgtagtcaatgtagtggatatttttgactttaatggctccgttatccctggcctaccacgctttgtagcaggaaatgatgtcctcttggtcggaaacaaaaaagatatcttgcccaagtctgtcaaggacagcaaggtaactcattggttgatggagcgtgcccatgaagaaggcatgcgtcctgtcgatgtggtcctcacctctgctcaaaacaagagcgcgatcaaggacttgatggaaaagattgagcagtaccgcaagggccgtgatgtctatgtggtgggtgtgaccaacgtagggaaatcgaccctcatcaatgcgattatccaagaaatcactggggataaggatatcatcacgacctctcgcttcccagggacgacactggacaagatcgaaatcccattggacgatggatcctacatctatgatacaccagggattatccatcgccaccagatggctcattacttgacagcaaaaaatcttaagtatgtcagccctaaaaaggaaatcaaacccaagacttatcagcttaatccagagcaaacccttttcttaggtggcttgggacgttttgactttatcaagggagaaaagcaaggtttcactgccttctttgacaacgaactcaagcttcacagaaccaagctcgaaggagcgactgccttttataacaagcatgtcggtggcttactaactcctcctaatagcaaggaaaaagaagaattcccgcctttgatttcccatgagtttaccatcaaggacaagacagacctggtcatctcaggactcggatggatccgcgtcaatggcgaagccaaagtagccgtctgggcaccagaaggcgtcgccgtcgttacccgcaaagctattatttaaaaatttgaaaggaaatagtttctttatagactgggcgagtgcaacgagcctagaaaggatacttttcgctgtggtgaaagcctaagtagatattttactacttaggcgcggaaaatttgagactttaggctcaaatttaagtcatggaactccgctaggaggtcgctgacgaccgccaccacatcagaaaagtatcaaaaaagaaacaatgaaaaaacatgacattaacatctaaacaacgggctttcctcaatagccaagcccacagcctcaaacccattatccaaattgggaaaaatgggctcaatgaccaaatcaaaactagtgtgcgccaagcgctagatgcgcgcgaactgatcaaggtaactcttcttcaaaatacggatgagaatatccatgaagtagcagaaatcttggaagaagaaatcggtgtggaaacggtccaaaagattggtcggattctcatcttgttcaaacaatcgagcaaaaaagaaaatcgtaaaatttcagcgaaggtaaaagaaatttaagacatcgaggagagcaaacctatggcaattgaactattgactccctttaccaaggtagagttagagccagagatcaaagacaagaaacgcaaacaagttggtattttgggtggaaatttcaatccggtccacaatgcccatttggtcgttgcggatcaagtgcgccaacaattagggttagataaggtgctcttgatgcctgagtatgagccaccgcatgtcgatgccaaggggacgattgcagagcaccatcgccttaagatgctggaattagccattgaaggcattgaaggtctggagatcgagacgattgaactcgagcggaaaggggtttcctatacctacgacaccatgctcttgctcaatgaacgggatccagacacagattattacttcattattggtgcagatatggtagattatttaccaaaatggcaccgcatcgatgaattggtggagattgtgcaatttgtcggggtccagcgaccacgctataaggcagggacttcttatccggtgatctgggtggatgttcctctaatggacatctcctctagtatggtgcgtgattttgtggccaaaggccggacgccgaattttatgttgccaaaaccagtcttggactacatcaagaaagaaggattgtatcaatgacctatgaaaactatctaggcttttctcgtgaggtcttgcttgaaaaaatgcgccaaatcctgccagaaaagcggcttactcactgtttaggggttgagaaggctgcgcgtgacttggccaaacgctatggggctgacgaagagcaggctggcctagcaggtttgttacatgactacgccaagaaactatcagatcaggaatttctggacttgattgatcgctatgagctggatccagcattaaaaaactggggcaacaatgtctggcatgggatggtcgggatttacaagatccaagaagacctcggactgacagattcagccattcttcgcagtattgagattcacaccgtggggagtggacagatgtcgaccttagacaagattgtctatgtggctgattacattgagcacaaccggaccttcccaggagtggatcaagcacgtgatatcgctcaagtttctttggatcgtgctgtggcctatgagacggctcgcacagtcgaacacctggcccaccaaggattgcccatttatccccaaacccttgaaacctataacgcctttgtgaagtatttgaaagaggagcagtgagtgaagacagcttttatcattattgatgtacaaaatatcttagtggaaacaggttttgagacagaaaagatcatagagaagatcgcttatttgcaagatcaggctagaaaacagcagattgaaattatctacatgcagcatattgaaacgccagaggctttaacttcggaagattggcaattatcgcccttgttgaagaggcaggcagatgagaaggtgtttcagaagcgatacaatagcatatttaaagagacaggattaaaagaatacttggatcaacaaggaattcaacaactggtcctgtgtggtatgcagacagaatattgtgtcgatacatccgtcaaagtggggtttgaatacggctacaagctggttattccagaaggagctgtcacaacctttgatggagaggatattccggcagaaacgcttaatgaattttatgaaaatatttgggcagaacgttttgcggatgtcttagattacaaatcaattttttaaggaaagaggattacatgaaagaaaaagaactacttgaattagttgtcaaagcagcagatgaaaagcgcgcggaagacattgtcgctttggatgttcaaagcttgaccagcgtgacagactactttgtcatcacaagctctatgaacagccgccaattggaggctattgctgaaaatattcgcgagaaggtcatcgaagctggtgggaatgccagccacgtcgaaggtgattcagctggaggttgggtccttcttgacttaggtggtgtggtggttcatgtcttctcagaagaaatgcgtgcccactataacctagaaaagctatggcacgaagcaagtgctgtcgatctttcagcagccctagcataagcaggtaaactcagttggtagcaactgagttttgttggttaaattgaaattctatggaaagaaaggatagggccttgtgtttggttaatttcttaattgaacacgagctaaaagctgtgagaaaaagaggaacttcctttgtatctgacgatagggcagaaagtttcctattttctctttgcttttaaggctctttgtatcttagaaaggatttgaacccgtcctgtaatcctcggaaaatagatagctctccttggagcttagctccatcgtcgtgctcctaattttctatcggattacgggcggacttggtatcatgaatatggcgacttatgaaacctttgcggcggtctatgatgcggtcatggatgacagtctgtatgatttgtggacggatttttctctccggcatctccctaaaagcaaggatcggaaaaaattactggaattggcttgtgggacagggattcagtctgttcgcttttctcaagctggatttgatgtgacggggttagacctgagtgctgacatgctgaaaattgctgaaaaaagagctgcttcagctaagcagaagattgattttatcgagggcaatatgctggacctgtcgcaagcaggcacttatgactttgtaacctgctactcggattctatctgttatatgcaggatgaggtggaagtaggagacgtctttaaagaagtgtataatgccctcaatgaggacggagtctttatctttgatgtccattcgacctatcagacagatgaggtgtttccaggctattcttaccacgaaaacgcagaagactttgccatgctttgggatacctatgaggatgcagcccctcactcgatcgtccacgagctgaccttctttatccaagaagaggatggctcctttagtcggcacgatgaagttcatgaggaacgcacttatgaagttttaacctatgacatcttattggagcaggctggctttaaatctttcaaattgtatgcagactttgaagacaaagagccaacaaagaccagcaaacgttggttttttgtagcacagaagtaggacagcatgacagttacaggtattattgcagaatttaatccctttcacaatggtcacaagtacctgttgaaacaggcagacgggctgaagattgtggccatgtccggaaattttgttcaacgtggcgagcctgccattgtagacaagtggatacgtgcgcagatggctctggaaaatggagcggatctggtggtcgagctcccctttctcgtggctgttcagtcggctgatcattttgccaagggagcggtagaaatcttgtcccgtctaggaatcgaccaattgagttttgggacagaagaagtcatagattaccaagcgattgcgactgtttattcggagaaagaggcggaaatggaagctttcttgcgaagccttccagaagatttatcctatccacaaaagacccaaaaaatgtgggaaacctttgctggagtggagttcacaggagatactcccaaccatattctgggcttggcctatgccaaggcttgtgctgggaaggggattgcgctcaaggctatccaacggcaaggtgcaggctaccattcagaagaaaaagaggtggcctatgcttctgcgactagtctacgcctacacaaggaagatcaggactttgtcgctagattcatgcccaatagccaactctttcagtcggctccacaggtatcttgggaggattatgaccaactgcttcgttatcaaatcctaacccatccggatctgacacagatttttcaggtcaatgaagaactggcccatcggataaaggatgcggttcgaagtgctagctctgtggaagacctggtggagaaagtcgcaaccaagcgctataccaaggcgcgtgtgcgccgcatcttgacctacatcttggtaggggcgatggatcaagctcttcccgatgccattcatgtcttaggtttttccgcaaagggacaagctcatctcaaaggtttgaaaaaatcagtaggaaccgtgacccgaatcggtaaggaaccttgggatgctttgactcagcaagccgatcaggtgtatcagctaggccatccccaattgcgagagcagatctggggtcgagtgccagtgagagtggaagatcaataaagggtgaatagccgagcaactccaattgaaggatacgcaaaaaactcttccaagtcttgtgatttgtgatataatataaaagattgaaaataatttgaaaaaatttaaggagaatcctcatgggacgtaaatgggccaatattgttgccaagaaaactgccaaagatggtgccaactcaaaagtatatgccaaatttggtgtggagatctatgtagctgctaaaaagggtgaaccagatccagaactaaatactgctttgagattcgttattgaccgtgcgaaacaagcgcaagtgccaaaacacgtgattgataaagcgatcgataaggcaaaaggaaacactgacgaaacctttacagaaggacgttacgaaggatttggaccaaatggttcgatgttgattgttgatactttgacttcaaacgtaaaccgtacagctgccaatgtccgtgctgcttttggtaaaaacggtgggaacatgggagcttccggttctgtatcttacctctttgacaacaaaggtgttattgtctttgctggtgatgatgccgatgccatctttgagcttttgcttgaagcagatgtggatgtggatgatgtcgaagcagaagaaggaacgatcacagtctacactgctccaactgatcttcacaaagcaatcgttgctttgcgtgaatcaggtgtcgaagaattccaagtaacagaattggaaatgattcctcaatcagaagttgagttgtcaggtgaagatttggaaacatttgaaaaactttacagcgttcttgaagacgacgaggacgtacaaaaaatctacacaaacgtagatggattctaatcactcgtaaggactgtagtgaatcccataaattaagaaaaaggatagcttctcagatcaagctatcctttttctctgtctgatgaggatctatcttttgtaagtgatgtcctgtataagcgtaaatacgggtcaggggtgattgggagagtgtggaaactttaaaatagaaataatggtctcgatgatcccgacttttggtgtggtgaagacgaaagtagtttcgctggcctgctgccatagagtggagaatatcgtcttctaaaaagacgagcggcgtagaagtagcggcccacttgtaaaagtccatctcaaattggtggtaattctccgaaaaataatcaaattgtaattcgtgtttagtctgaataggtttcatagggtgtttcctcagattcaataaaaatgatagagtctacgaggagacggtggtagtggccatcgcttttgagaagaagctcagaagtagataaggtgtgaatcgaacctgtgtgagtcgaaaaatggttgccctctagaatcgtgatagagatcgtcgtttgttgttgaaaggcctgctccaggagctggatctgttcagcaagtggaagaattgtgagctgactgcggtcaatttcttttgtatgcagggcagttgtgtgctcggataaaaagaagccggcccatttagccatgccacgatcttgaaattcgcgggcggattgataaggaagataagaacggtcgatcatgttaatccatctaagcctcctgcagaatgtccgcctgttagtttactgcgtgcaatggcgcgtgagttttctagtaatgaggagcctttctgaagagaggtaaagccaaattggtcccgaatgcggtcgatcgtctgttgaagtttctcctctttttctagggctactgggtcatcgaagagagaaaagagttgaagagactcctcgacaagttctccataaaaaacaccaatctgccgaatggctcctccttcgtacttggagcgaaagagccgcagaaccgtatcggataaaaccttagtggattgggtgggctcaatcttttgctggcagtgaatggacggaagtccctcgattttggagtaggaggcatgaatagagaccagctgggtcttcttttttttccgtcgcaagcgaatagccacctgttcagccatctcccgaaacaccagttcaatgtcggcttgtagatggtagtcatagggcaagatttgagagttgccaatgcctcgtgacttcggacgataaggcttgtggacattgctttcatcaataccatgagcatggaaccaaagttgcagacccatgactccgaattctttctttaagagatctgggtgagcctgagccagttcagcaatcgacgtgatcccgatcttttgcaatcgtttttcagtacgacgtccaatgccccaaaaatcagtgagctggggcagtttccagaccttactttctacatcttcataagaccaattggagcgcatatttcggcaatgcttggcttcattgtccaaggctagcttggcaagaaggggattggcattgctgaggccgatggtagagtagatgccagtttcctgccagatccttttttggatcctggcagaaaggagatccagtttctcctttcgagagagggagggatctggaataaaataatttaaggaagaggtcagatcgataaagccttcgtcaatcgagtaagggaaaatatcatctggtgccgcaaattcctgaaagactttttgaatctccatattgacctgaatataggcattcatccgtggagggacaatcagggtcctcttggcccaggattcaatggatgcaataaaggctggatctgtgggcaatccttgttttttggcggcgtagctattaaattttctggttttgaggtcaaaaggtaggtcgtagctacggctgacatttttcttgccgaagacttgtttgaaaacgggagagctcgccaaaatcaggccagcagaattgtcgcttcgactcatgacgcaaagggaagtcgtcaaggggttgagccccagacggacacattcacagctagcataaaaacttttcatatccacaaaagcaatatcagaatgaggctcacgtgaataatcaaatagcatatttaaacctcgagtgggagaaaatgcccgaccacaatgccgacgattttgggctcgtcttcatagggagcaaataaatcatcgtagtcagggttgatggattctaagcgcaagccttcagcctcccgatagactttcttgatataggtctttccattccagatgagggcgtagacagccccatcatagtcaaagccagtctgcttcatgagggcaacagagccgttgggatagagaggttccatcgaatcacctgatacccaagaagcgaaatcgtgctggatctcttggtcaaaatagacagtttcatagtccgtttcgttgtcataaaaggtgtgtcctaaaccggctgccaactcaatcgaaagaaccttataagcagtcaaggaaacaactttttgctgctgttcaaataactggctggccaactggtcgactttcttttgatgaggtggggttaataaagggtaggtgtagagtgcggagtctttgttaataaagtagtcctctttaacggagaggcgcttggccaacctcctgagatttttttcgtgcggctccgctaagccattctcccaactggagtaagtcttgcgagaaatcttgagatcctcgtagacatctgcttgggtcaagcctttttccaggcgtctttcttttagtttttttgcatcaaacatgtcgcttctcctacgtaacgttttaaaggttacgtatagtttatcaaaaatgaatcctttttgcaagagaaaaattcagttgaaaacgaatgaaaagacttgattttgattgaaaaaggagtataatcaattctaaaatgtctataaatgaggaactatatgaaaaaaagttttatccaccaacaaaaagaaatttcgtttgttaaaacgacgtttacgcagtatttaaaagataaattggatatcattgaagtccaagggccaattttgagtaaggtcggagacgggatgcaggataacctttctgggattgaacatccggtatctgtaaaggtccttcaaattcctgatgagacttatgaagtcgtgcattcactcgcaaaatggaaacgccatactttggcacgttttggttttggcgaaggagaaggtctctttgtccatatgaaggctcttcgtccagatgaagattcgctagacgctatccactctgtttatgtagaccaatgggactgggaaaaagtcatcccaaatggtcaacgcaatatcgcctacctcaaagaaacggttgaaaaaatctacaaggcgattcgtttaacagaactagcagtagaagcgcgctatgatattgagtcagttcttccaaaacaaattaccttcgttcacacagaagaattggtggaacgctatccagatttaactccaaaagagcgtgaaaatgccattgccaaagaattcggagccgttttcttgatcgggattggtggagagcttgcagatggcaaaccacacgatggacgtgcacctgactacgatgactggacaacagagtctgaaaatggctacaagggcttgaatggtgatatcctcgtctggaatgacgttctaggttcagcctttgagctgtcttcaatggggatccgtgtcgatgaagatacgcttcgccgtcaagttgcgatcacaggggacgaggatcgtctccaattagagtggcacaaggctttgttaaatggtctcttcccactcacgattggtggagggattgggcaatctcgtttggctatgttcttgcttcgtaagaaacatatcggtgaagtccaaaccagtgtctggcctcaatctgtccgcgatgaatatgaaaatatcctataaggaagaaagagagtgggacagaaatcggtaattcgttagaattcgatttcgtcgtcccacctccgcacagttgagtaggggtgtaaaagctgatgaaatcagcgtagtagagcccactcaaccactgcgtcttactcgacaatccaaaaataattgagaggctaggacttttgtcccagcctcttttagttgtcgcttgaccatatcaaatcgcaattttctgattttttttggtataatggtccctatgaaaatagtatctggaacctatgggggacgtcccctcaaaacacttgaaggaaaaacaaccaggccgacttctgataaggtcagaggggccatgttcaatatgattggtccttactttgatggtggaagagtgctagatctctatgcaggaagcggtgggctctctatcgaggcagtttctcgaggtatgtcagaggccgttctagtggaaagagatcgcagagcgcaggagattgtagcagccaatattgccatgaccaaggaaaaggaacggtttcaactgctaaaaatggaggccaagcaggccttagggcttttaacgggcacctttgatttggtgttcttagaccctccgtatgccaaggaagagattgtccgcgatatcgaaaccttgtgcgagcgccaactcttgtcagaggacatcatgattgtgtgcgaaaccgataaacacgtagaacttcctgaggaaatcggacaagtgggaatctggaaagaaaaaatctatggaattagtaaggtaacagtatatgtcagatagaaatggattgtttacaggatcgtttgatccgattaccattgggcatgtgcaattgatcgagcgagctagtcgcttgtttgaccgtgtctatgtcggaattttttataatccggaaaaagtcggactcttttccattgagcagcgcgtgcgcatggtgaaaggggccttggctcatttggaaaatgttgaaattgtgacgtcgactcaagagttggctgtgacagtggcgcgcaatctaggggtcatcaccttgatccggggcttgcgcaatgcacaggatctggtatacgaagccaatatggattattttaatcaccagttggcgcctgaattggagacggtttatctctatgcccagcctccttaccaggccattagttcaacccgtattcgagagttgctggcttttcagcaggatatctcaccttatgtaccaaagagtgtaatggaggaaatcaaagatgacacaagcgaataaaccaagcttgtctacaaaaaagaaaaaaggacgattgaaagaataccgatggccgattgcaggcgttcttttcttgctcctcttgctagctgcttttgtgattcgccttccctattatattgagatgccaggaacggcagaagatattcgatcagtcatgacagtcgatggaaaagcggataccaagtcagggtcttatgactttgtaaccgtagcagtgaaagaagcgactccggctgatttgatctatgcttgggcgacaccttttacagatatctactctgccaaggatatgacaggtggtagttcgagccaagaatttacgcggattaaccaattctatatggaaacctcgcaaaatatggccatctaccaagggttaaagacagctggaaaagaaacccagatggactttctaggtgtttatgtcatgcaggtggcagatgattcgacctttaagggaatcttgaacattgcggataccgtcaccggtgtgaatgggaagacctttaagagttccaaagaattgattgattatgttggttctcaaaaaattggcgaccccgtttcggtgacctatattgaggatggacaaacaaagaccgcagacggaaaaatcatcaaattgtccaacgggaaaaacggaatcgggattagcctgatcgaccggactgaagccaaaggcgatgttcctgtccagtttgcgacccaaggaattggtggaccaagtgccggcatgatgtttagcctagccatctacacccaagtggctgatccagatcttcgtcagggacgccatattgcagggacaggaaccattaaccaagatggaacggttggtgatatcggtgggattgacaagaaagtcgtcgcagccgataaagaaggagcagaaattttctttgcccctaataacccagtttccaaagaagaaaagaaagccaatcccaaggccaaatcaaactatgaaacagcgaaagaagcagcgaaacaaattcattcgaagatgaaaattgtccccgtcaaaaccttacaggatgctattgattatttgaagaagaattagcgtagtctgttggacaagtgatgaaatgagagaaaatcaatttctaatttttatgaaggattatgggtcaagaaagtaatgagtttatgaaatcatataatatgttgctaatgaatgggattattggtattttaggagcaatcgtaatcagctatgcctcttttcaacggtgggagtggactttcgttcatgctgttcctgagctggttgaaaaaggtgattggggattggtaatcaatacaatcagtctcttgtatcttgttatctctatacttgcaatggccaactatagtgaaaatccaaaagtaaataagaaaagtcataaaattctcttcgttgcttctatagttggtttcgttccttttgtatcgtctttaactagtgtgctagcaatcatttcaagtttgttatatctattcgattatcaacagttatcaaatgaaaagaagtaggctttgaaaaaagtatttggtgatgtgaagtaaaagaaaagtaggagaaaatcataatgaaaaacaaaaaagctagcatgttaatagctatcataatgcttgttattggcagtataatttttttcaaatataaaaattcctcagagaaaatttatagaaatgaaactccgtcaaaaattagggaaataaaattattggacaatgataaatttgtttttgtggctgtcgataactatttagacgatgttattttgtttggtcagaattatgttacaactttttcttcgcatacacttgatactactaattttaaaaaaactcctccaattgggagcgaagaatattttcaaattattagttatagtgtacatgataaagaaaaaattgttaaatttaatttatatgaattacttgggaagaataatttataccgttttgttcataattttcctcgtagatatttacaaaatgacgatgattacctgacaatggatttggagaaactaaatatgtacgatatagcaggtcatgatattagatctgtattagtttctgttagcggagagaaagttaaagatatttctgaaagtgaaatggagaagattgacagagagcaaaaactatattttagcccaaaatatgattgggataggggggggatatctgagcaaattgatgataatctagcaaaatatcatctttcaagatttaataattttatatccccgatgaatgatgaatcatctaaaattaatgttagtggatctaactttgctaaattgtttccagaagtaggaaaaaatataaactatttaaatcgcatttatttccgtccgaaacaatacaatgagcgcgaatggtttgataaaatcattcattggtttgcgccagaaggtcaagacgtcatggaattgtacgccacagatgaaacaactggagagaaaacacaaattcactcgtatgacgagttcgtagcatggataaaggcacatccgaagagttaattatcttctaatcaaattcaagtttttgcttatcaatctctctatttttagagggattttttctttatactggtgtcagaaagaaagggaggtagtgaaatgattcaaaccagtttgttttccatttcagtattcttagcgggagttctatcctttttctccccgtgtattttgccactgatgccagtctatgtagggattctattggattctgagcatgaaaaaacggtgcgtatttttggaagagacatttcttggtatggcctggtgaagactctttgttttatcgcaggtctatcaactgttttcctgattctaggatacggtgcaggggctcttggacaggtgctttatgctccctggttccgttacctactaggagggattgtcatcttattgggaatccatcagatgggcctcatcaatcttcagcaactccaaaaacaaaagagtatccaactgaagaaggatgaaaaacgcaatgaattcttcaatgcttttctgataggggtcaccttcagttttggttggaccccttgtgtcggaccagttttgagttctgttctagccattgcagcttctggaggagatggtgcattgcaaggcgctctcctgatgctggtatatacattaggcttggctctgcctttcttgcttttggccttggcttctagctgggttctacaacattttgctaaactcaagccccatatgggaaccttgaaaaaaattggtggtgccctcatcatcttgatgggcatcttgctgatgctaggaaatcttaatagcctcgcatctttgtttcactaatcttaagggattaaaggagaaaaatcatgaaaaaaattcttgcactttctattgctacacttagcatcgtcactttagcagcttgttctggacagaaatcagattcagacatgaaaaaaacggacgatagtagtatgatgaagaaggacgatatgaagaaggaagatatgaagaaggatgacatgaaggattcatccatgtccgatgataaaatgaaaaaagaagacatgaaagattcatctatgatgtctgacagcagttctgaaatgaaggatgatatgaaaaaggatgagatgaaatccagtgattcagaaatgaaagacgaaaagagtggatcatctgatatgaaatcagacaactaatgaaagaagggagaggtcatctgaggatgactttctccttgtttaaagaggtaataatgatgaagaaattagctttagtagctgcaggattcttgtgtactggacttttgggggcttgctctaatcaaggaatggctacttccaataaggacatgagccaacaaacagccaaagctggggctaggcaaccatctggcaagaaagtgaaggagtttaacctgcaaggagtagacggtaagacctaccgcttatccgattacaagggaaagaaagtttacctcaaattttgggcttcctggtgctcaatctgtctttcaacattaggcgacacaaatgatttagcaaaggcagaggagggtaaggattatgtggtcttatccgttgtagctccaacctttaatggtgaaaaatcggaagcagatttcaaaaactggtaccagtctttggattacaaggatttcccggtcttgctagatagtaaagggaaactgctcaaagaatatgggattcgttcttatccatcggcactctttattgcaagcgatggaactctcgctaagacccatatcggttatatgagcaaggaagacatcgtccagactctaaaagaaatgaagtaaggaggacataaaatggaaacaaaatggaaactcatttccattcttttagtggggctattttgttttggaatctttttccttgtcaaaggatccatggccttggatacatcagatgcgacgactgagcagatcaaaaaagcgtccatgagtcagactccagtagccaaaaaggaaacaaaggaaacggttgatccaaaggatcagcgtgaaatttatttggctggtggttgcttctggggcgtagaggaatatttctcccgtgttccaggtgtgattgatgccgtatcaggctatgccaatggaaagggagaaacgaccaagtatgaattggtccctcaaacaggccatgctgaaacagttcacatcacctacaatgtcaagaaggtatctctgaaagaattgctcctgcattatttccggattatcgacccaacgtcgaagaatcgacaaggaaatgatcaaggaacacaataccgaacaggtgtctattatgtctcccaagaagaccttccaaccattaaccaagtctttgaagaagaagcaaaaaaatatgacaaaccgttagcagtggaaaaagagccactgaccaatttcatcaaggctgaggactaccaccaggattatctaaagaaacatccgaatgggtactgccatatcgatgtcaatcaggcttcttatcctgttgttgatgctagccgctactccaagccaagcgatgaggaaatcaaaaagaagttatctcctgaagagtatgcggtgacacaagagaatgatacagagcgtgctttttctaatcgctattgggataagtttgaagcgggcatctatgtggatgtcgtaacaggagagcctctcttctcctcaaaagataaatttgattctggttgtggttggccaagctttagccgaccgatcagtccggatgtggcaacctacaaggaagataagagtttcaatatgactcggacagaagttcggagccgtgtgggaaattcccatctgggccatgtttttaccgatggtcccaaggaaaaaggcggccttcgctattgcatcaatagtttgtctattaccttcattcccaaagcagaaatgaaagaaaagggctacggttatttattggactatgtctgagacaattcagtctataatttgctataataagtatagcaaaaacaagtaggtgaaagacatgtatgcgatcatgattgtggaagatgaagagcttatccggcagggactgacttccttagtggattatgaacagtttgaaatgaccatcatcaaccaggctaaaaatggacgtgaggcctgggagaagtttcaagatcaaccagctgatatccttctaaccgatatcaatatgccacaaatgaatgggttggatttggcccatctcgtcaaagagcaatctccgtcttgccatatcatttttttgacaggttatgatgactttgagtttgcgagaaaagccatcaggttaggtgcagatgattatttgctgaagcctttttcaaaagatgatattgaagagatgttagcaaaggtgaagggaaaactcgatcaagagcgaaaaaaggcgcaagtcgaagatttggtcagtcatggttattcgacagacttggaaaaagccattcatgctcgtttagcagactctcagttaactctaaaggatctggcctatcaacttggtttcagtgcctcgtatctaagtgtattgatcaagaaaaaattgggactccccttccaagactacctcattcaagagcgaatgaagaaggctcaactcttacttctcacgacggatttaaagatttatgagatcgccgatcaggttggttttgaagatatgaactatttttctcaacgctttaagcaggtggttggggtgacaccaaggcagtacaaaaaaggagagcatgaatgaaacgatatcccttgctgattcagctggtcctctacttttttctcttcattctcctactttttggtcttattggtggtctctattatcaaacgagttcagggacgatccgccagcaaacagagcggacgacaagaaatagtatcgatcaaagcagtcagtttatcacttcctatctaaaaaaattaaagcagacgacgacggtgcttagccaggaacaggctgttcgacaatttgcccaagacaagagtgcggatcaagaaacggttcaacacctgatgagaacgatgattgaaacggatccggacttggtctcagcggtcttggtgaccaaggatggacgtctggtagcgacagattccaaaatcagcatgcagacttcttcagatatgatgaatgaaagttggtatcaagaggcgattaaagaaagagccatgccagttttgacgccagctcgaaaggaatctttgactttggaaaaagaaaaatgggtggtttctattacccaagaagtggtcgatcagactggccaaaatctcggagtagtacgcttggatattggctacgatagccttcaggcttacttggatcaccttcaactagggagacaaggctttagttttatcattaatcaaaagcatgagtttgtctaccatcctaaaaaggcggtctattcctccagccaagaaatgcaggccatgcagccctatattgctgtgacagatggctatgctaaaggaggacagaattttatctatcaggttccgattccagatagcgattggaccttgattggagtggcttcacttgaaggacttcagatgctgcagtcgcaactcctgtactctttcattggtctaggattactagctttgatcatgtgtttgatagggatcggctttgttctgcgtttgtggatcaaacccttacaagaccttcagactatcattttgaggattggagcaggagatgctcacgtgagggctgcagccaaaggatctccagaattggtggccctcgctcaagcttttaatgccatgttggaccaaatcgataacctcatgcaacaggtcaaggaagaggaacagaacgcacggcggtacgagttgcgggcactttctgctcagataaatccgcatttcctctacaataccttggatacgattgtctggatggcggagtttaatgatagtcggcgcgtggtcgacatcaccaagtctctggctcaatattttcgactggctctcaaccaaggccaggagcaaatcctactgagagatgaaattaaccatgtccgccaatatcttttcattcagaagcaacgttatggtgaaaagctcaactatgaaattctagaagatgaacggttgggcgactatcagctccccaaattagtgcttcaacccttagtggaaaatgcgatttaccatggcattaaagagatcgatcggccaggtctcattcgagtgacaactgaagtcagtggagactatgcctgcgtatcgatttttgacaatggacgagggtttgaccgatcagaatcaacagcccaaacccttcttcgtttaggaggtgttggcttgaaaaatgtggaccaacgattgcatcttcaatttggcgaagcctatcatatggagattgattctaaggccaatagctatacgaaaatcactctttatttgcccctttcatcatctgatgaacatgtatagagacaaagattgccttctttgtctctttctccttttagaaactttcaatgttgaatttcaactcttttctagtcaaatctgacgcaagtcatcaaatttatgataaaataaagtgttacagtaaatagattttgatgaaggaacactatgcgaaaagagattgaccctgaattatataattacaataaatttcctggacctgtgtttcgtcaggtaggagaccagatcctttcagaaaacctctcctttgagctgttgaaaaatgagaaggaagcttttgatgcgactgtttttggtcagagattttctgagattttaaccaagtttgattacattgttggtgattggagcaatgagcagttgcgcttgcgtggcttttataaggaagagcgcgatgttgcaacgatggataaattaagtcgcttagacgattatttgttagaatattgtagctatggttgtgcttattttgtccttgaaaataaggagccccatcgtgcttcttttgataagaaatcaccggtcaaaaaagctcaatcagaagaaagagagccgaagaagcgttcgcgcaatcgcaaacaaaaagatcgtttccaaaaacgagaacgcgacaagggacagtcagccaataactcgaaaaaaacaagaccgtctgctgagaccaaaaaaacaacgaagacagacaacaaacgtcattttgtgattcgacaaaaagaggagtaagaaagaatgaaaccatccatttatagtttaacacgccaagatatgattgattgggcggaagaaaacggggaaaagaaattccgtgcagcacaaatctgggaatggctctatcgcaaacgcgtccagtccttcgaagaaatgaccaacctttctatggatttgattgcaaagttaaatgatcagtttgtcgtcaacccactcaagcaacgaatcgtgcaagagtcagcagatggaacggtcaagtacctttttgaattgccagacggcatgttgattgaaaccgtcttgatgcgtcagcactatggattatctgtctgtgtaacgactcaggtaggatgcaatatcggttgtaccttctgtgcttctggtttgatcaaaaaacaacgagatttgaacaatggtgaaatcgtgtctcaaatcatgttggtccaaaaatactttgacgaacgtggccaagatgaacgggtcagccatatcgttgtcatgggaatcggagaaccatttgacaactataacaatgtcttgaaatttattcggacggtcaacgatgacaagggattagcgattggtgctcgtcatattaccgtgtcaacttctggtttggctcataaaattcgtgactttgcaaatgaaggtgtgcaggtcaatttggcagtgtctcttcatgctccaaacaatgacttgcgctctagcatcatgaagatcaaccgggcctttccaattgaaaaattgtttgcggcgattgaatactatatcgagactacgaatcgtcgggtgacctttgagtatatcatgctcaatgaagtcaatgatggggtcgagcaagccttagagttggcagaattgctcaagaatatcaagaaattgtcttatgttaacttgattccttacaatcctgtcagtgagcatgaccaatatagtcggagtcccaaagaacgggtcatggccttctatgataccttgaaaaaacaaggtgttaactgtgtagtgcgtcaagagcacggtacagatattgatgctgcctgtggccaattgcgttcaaataccatgaaacgggatcgggagaaagcgattgttgaacatgcgcaaccttaaacaagggctgatcgatcatacagaactaacaaaaagaggaagaaggctgttacggagtggcagcttcttctattttatcctcttgtgtctgatgtgttttttgccccaacagccagagccaggtatggaaacaccgggtattcaacatttcggttgcatcgtcgtcttgctggttcctcttaattcggtgatgaatcttggccaaatcaccagtgtcctccaactcattaaggtcattctccaaaacatagccaatatctttttgttaagcccgctggtctttcaacttctctggctatggccctggttgaggagtcgcaaacgggtcttgtgcttcggctttgccatgagcttgtggattgaatgtagtcaagttctgttagatctcttgttcaatgccaatcgtgtctttgagctagatgatttgtggaccaataccttaggggcttatctggcttatataggctttcagtatttcagagcacgattgctagcaaaaaatggtgaaatgtaaaatccgaacattttaaccactttttaaaatttttgttgacaaaatcagaagcgggagctataatagcttcaagacatcagaaaagtagagatttttctcacttccagggagcttgtggtgattgcgaacaagcagtggtgaatcttgaaatgggctgatgcgtttatgataatgaatttgaaacaataaaatttcggtgagcacaccttatcgtgcaccctgttgttagacaggtcagagatgtaggagaaaaaatagcttcctacaattgaggtggcaccgcggtatcgaatcgtcctcacacagatttttctgtgtgaggttttttgtatctcataggaacccagtgagactgcagctcaaagggcccgcgagagaaaaagatcataaacaagattgaagatagagaaaagaggacacaatcatgacagaaacaaaaggctatttcggacaatttggtggatctttcgtaccagaacccattcaaaacttgctcaatcaattagaggaaacctttgaacagtataaaaatgatccagaatttatcgcagaatacaaacattatttgaaagattattctggacgcgaaacaccactctactttgcggaaagtttgacagatcatttaggtggggcaaagatttatttgaagcgcgaagacttgaatcacctaggttcgcataaattaaacaacgtcttggggcaaatccttttggctaagcgcatgggcaaaactcgcgtgattgctgaaacaggagcaggtcaacacggtgtggctacagcagcagcggcagctaagtttggcatggcctgtgatgtttacatgggggcagaagacgtggaacgccaacgcttgaatgtcttccgcatggaaatgatgggggcaaccgtccatgcggttgaaaccggtactaagaccttgaaagatgccgttgatgcggcgtttggagcatggatggcggatctggatgccttttacgttttgggttctgctgttggacctcacccttacccaaccattgtgcatgaattccaaaaagtaatcagtgaagaatctaaacgtcaaatcttggaaaaagaaggccgtttgccggattatgtgattgcctgtgtcggtggtggctctaatgccattggtgccttttctgaatatgtcgcagaagaggaagtcggcttgattggggtagaagcagctggacatggcttggacaccgatcaacacgcagcgaccatgaccaaagggactatcggtgtggttgatggtatgaagacctatgcagtctttggcgaagatggaaaagtagcgccagtgtactcgatctctgctggtttggactacccaggggttggtccagaacatgctttctttaaagattctggtcgtgtcgaatatgtagcagcgacagatgatgaagcagtagaagctcttcttcttctcagtaagacagaagggatcctcccagccattgaaagctcacacgcgattgcggaagctgtcaaacgtgctccacaattggataaagacaagatcatcatcatcaatgtttccggacgtggggacaaggatgtggctgccatcgccgattatctagtagcgaaagctgcaaaataagaagaatttatctacaaaacatcgtataaagcagtaaagcgtgataactgagaaagagacagggtacaaaaggaatccggtctctttcttttttgagagcaaagacgagaatacctaagatggatgcgatctgaatgagaaagagaatcttggtagaagaaaaggtcagcgagaaggtggcgagtaagagaaaatctcctgctcctattccgataaagaaaaagtgagctccgatcgcaaggagtaaaaagaccagcatgaggagattaccaccggataaaaagaggaccagggcatggagacagcaccatatgaccaaggggtattccataaagcgaaggtcatagatggctaaaatggcaactcccagtagtgttagaagttgaggcagagaaagggaaccattggcgtaggctaaaaagagcaggccactccagacctcaaaaaggcagtaccaaaatgggtaggtctgatgacaatagcgacagcgaaaacgatggagtagttgcgagataatggggatgagatcccaaacgccaaggatgtgctggcagtgatcacaatgactacgaggagcgagaatggattggtttgggaaacggtcgacaactagtcccaaaaaagaggcgatgcaagtaccgatggtaaaaaaataaaagttgatcatacttatttattcgtaaagcaatcggaaaatttcatcatttgcttgaaaatcttgtaaagcctttctaaatttgatacaataatgaacatgaaaaacctgtatgatgttcaacaatttttaaaacgttttggaatcatcatttatgtggggaagcgcctctatgacatcgaattgatgaaaattgagcttcaacgtctttatgatgcaggcctgatggagcggctcgattatttagaagccgataccgttttaagaagagaacacaagcaagaattagaatttttgaaaaagagtgaggtagagtgatgggaaatatcattgtttggttggctattttaggagcatttggatggatggcgtttaattatttccgcatccgtaaagctgctaaatttgtggataatgccacttttgaagagctcattcgtcaagggcagttgattgacttgcgagagccagctgagtttcatgccaagcatattttaggagcacgcaacattccttctacccagttgaagttgagtcttgcagccttgcgtaaagataaaccaattttgctctatgaaaatagccgtagttcgcgtgtaaccaatgcggctctctatcttaagaaacagggctatacagacatttatgtcttgtcttatggtctcgattcttggaatgggaaagtgaaaaaagacgcttaataaaaagagctctaactgcacaaagtgtgtggttagagcttttttatctcgttttttcaaggtagtctttgacccgtgtgagctccacctcattcaaaggtcggctttctccaggggctaactgaggatccaaggtgaagggaccaaaagacaagcgttttaaggtcattactttgaccccaatggccaaaaacatctttttcacttggtggtattttccttctgagattcggacctgggccttgctgtagctgggggtactttctagaatggtcaaggaagcaggcttgcagatagggccgtccgtgaatgaaatcccattctgaaattgttcgatgtgggctgcatagagcggaccattgacttctacctcatagactttctccacatggtattgaggatggagcagttgaaagcctaagggaccattatctgtgaggaggagcagaccactcgtatcgcgatcgaggcgaccaagagggtagaggtctgggtactcttgctgggggtccactagatcgatcaccgttggatggtgggcgtctcttttggcggtcacggccccgattggtttatggagcatgtagtagtggtgacgcggttcttgaatgatctgatcccctatttggatttgttggagtccagggtcgatgttttgggatagcttttgagctggtaggtgatcgaccaagatttgccttcgggccaaaagttgtttgatgtctttacgagcgtactgatggtctgccatcaattgatctaatctcatgggagcctctttttctgaaattcttatcatcagtgtatcatgaaaagaaaaggaaatcgagtcagagaaaagaaatgaatatgaaaacatttacaactagctgaactgtgttttttagataggactgtggtataattgttcagttagaaatattatttaaaattttatagaggaaatcatgacaaaattaagagaagatattcgtaacgttgcgatcattgcccacgttgaccatggtaaaacaaccttggtagacgaattgttgaaacaatcgcacaccttggatgaacgtaaagaattgcaagaacgtgcaatggactcaaacgatcttgaaaaagaacgtgggatcacgatccttgctaaaaatacagccgttgcttataacggaactcgaatcaatatcatggacacaccaggacacgcggacttcggtggagaagtggaacggatcatgaaaatggtcgatggggttgtattggtcgttgatgcctacgaaggaaccatgcctcagactcgtttcgtattgaaaaaagccttggaacaagatcttgttccgatcgttgtagtcaacaaaatcgataaaccatctgctcgtccagaagaagttgtagatgaagttcttgaactcttcatcgaattgggtgcggatgatgaccaattggaattcccagttgtttatgcttcagcgatcaacggaacatcttcactttcagacgatccagctgatcaagagcacacaatggcgccgatctttgataccatcattgatcacatcccagctccagttgataactcagatgagcctcttcaattccaagtatccctgcttgattacaacgacttcgttggacgtatcggtatcggacgtgtcttccgtggtactgtaaaagttggggaccaagtaaccctttctaaattggatggaacgactaagaacttccgtgttaccaaactctttggattctttggtttggaacgtcgtgaaattcaagaagctaaagcgggtgacttgatcgctatctctggtatggaagatatcttcgttggagaaacgatcacaccgacagacgcagttgaagctcttccaatccttcacatcgatgaaccaacgcttcaaatgaccttcttggtcaacaactcaccatttgctggtcgcgaaggaaaatgggtaacctcacgtaaagtcgaagaacgcttgcaagcggaattgcaaacagacgtctctcttcgtgttgacccaactgattcacctgataaatggacagtttcaggtcgtggggaattgcacttgtctatcttgatcgaaaccatgcgtcgtgaaggatacgaattgcaagtatctcgtccagaagttattatcaaggaaattgatggtgtcaaatgtgaaccatttgagcgcgttcaaatcgatacaccagaagaataccaaggatctgttatccaaagcctttctgaacgtaaaggtgaaatgttggatatgatctcaactggtaacggtcaaactcgtttggtcttccttgttccagcgcgtggtttgattggatactcaacagagttcttgtcaatgacacgtggttacggaatcatgaaccacacctttgaccaatacttgccagtgattccaggagaaatcggtggacgtcaccgtggtgctcttgtttcaatcgataacggaaaagcaaccacttactctatcatgtctatcgaagaacgtggtacgatctttgtcaatccaggtacagaagtttacgaaggaatgatcattggtgaaaactctcgtgagaacgacttgaccgtaaacattacgaaagcaaaacaaatgaccaacgttcgttccgctactaaggaccaaacagcggttatcaagactcctcgtatcttgaccttggaagaatctcttgagttcttgaacgacgatgagtacatggaagtaacaccggaatctatccgtttgcggaaacaaatcttgaacaaagcagaacgcgaaaaagcaaataaaaagaaaaaatcagcagctgctgaataatatggagagaaaggagaaacaaaatggtctattttatcttagggattttgattctccttttttacctttttatgacccccaaaagtattcgtggtaccttaaacagtgtcacaatggtggtcttgatcgtctccattatcgtactgacttgtctggccatttttcagatattccaactaccgtctgagttttttgtcggtgcctttctcgcctttgttggctacctggctttggtggatatttccaaaatgacgaccaaacagaaaaaataaacgctgacgtgatttttaaagccctttgggctttttaattttgctaaaaaaaggtaaaatagagagtgataaaaatggagcgaagaaatcatgaaatttgtgaaacaatttgaaaataaaaaggttcttgtattaggtttggcgaagtcaggcgagtcagctgcccgtttgttggatcgcttaggagcgattgtgaccgtcaatgatggcaaaccttttgaagaaaatccagcagcacaaagtttactggaagaagggattaaagttgtgacaggaggtcaccctctggaattgttggatgaagactttgcagtcatggtcaaaaatccaggaatcccttattctaatccaatggttgaaaaagcgcttgaaaaaggcattccagtcctcactgaagtggaattggcctatctgatttcggatgcgccaattattgggattacaggatcaaacggaaaaacgacgacgacaaccatgatcggggaagtcttgacggctgccggccaaggtggtctattgtctgggaatatcggttttccagctagtcaagttgcacaaacagcaacagaaaaggatgttctggtcatggaattgtcttctttccaattgatgggaattgaagccttccatccagagattgcagtgattaccaacctcatgccaacccatatcgactatcatggttcttttgaaaattatgtagctgccaaatggaatcttcaaaagaatatgacagaaaaagatgtcattgtcttgaacttcaaccaagacctgaccaaggaactcgctacaaaaaccaaggcaagggtccttccattttcaacggttgaaaaagtggacggggcttatttggaagatggacttctcaagtttaagggagaagttgttatgcgtgcagatgaactgggcgttccaggtagtcacaatgtagagaatgccttggcaacgattgcggttgcaaaagtccggggtgtggagaatgaggtcattaaagaaaccttgtcagcctttggaggtgtcaaacaccgccttcaatatgtggatgaaattcaaggtgtcaaattctataatgatagtaaatcgactaatattttagcaacacaaaaagccctttctggttttgataacaacaaggtgatcttgattgcaggggggctcgatcgtggcaatgaatttgatgaattggtgcctcacattactggcttaaaggaaatggtgattctaggggaatcagctcctcgagtgaaacgcgcagccgataaagcaggcgtcccttatgtcgatgcggcagatgtagcggatgcgacaaagaaagccttcgatttggctagcaccggagatgttgtgctactaagtcctgccaatgccagctgggatatgtatccgaattttgaagtgcgtggggatgaattccttgctacagtaaaagggttgaaataaaatgaaaaaaataatgtttactggtgggggaaccgtgggacatgtgacccttaatctcctcttgattccaaaatttatcgaagatggatgggaagtccattatattggggacaaaaaaggaatcgaataccaagagatcaaaaagtctggcttagaggtacgattccattcgattgcaacagggaaattgcgtcgctatttctctttccaaaatatgatggatgtgttcaaggtggcttggggaacgctccaatccatagcgattctgctccgtgtgcgtccacaagttctcttctcaaaagggggatttgtctcggtgccaccagtgatcgcggctcgtctcactcgtgttcctgtctatatccatgagtcggatctctcgatgggattggccaataaaattgcttataaatttgctaccaagatgtacacgacttttgagcaagcacatggtttgacaaagagtgagcatatcggtgcggtaaccaaggtcacagatcatattccgccaacttcagaagttttagaagaaaaaacaaaaggtttccgaaaagacttgccgacccttctctttgtcggaggatcagccggtgcgcgtgtctttaatgaatttgtgacagaacacaaagcagagctcttgcagcactacaatatcatcaatttgacgggtgattcaacattgaatcaggctgagggcggtttgtatcgagtggattatgtaaccgatcagtatttgcccatgctccagaaggctgatttagtggtgactagaggtggagccaataccttatttgaactcttagccatgaacaaactccacctgatcgtaccgctaggaaaagaagccagccgtggcgatcagattgaaaatgcccaatattttgtggataaaggttatgcagagcaattgcaagaagatcaattgacgctcgaaacttttaatgaaaccattcaagaaatgttgaagcaaagccaagtctaccaccaagcaatggaaaaatcgacagaactcctttcactagacgatttttatggcctgcttcaaaaagatatcagtaagggaaaagatgacggacgacaataaaaaaacgccaacggatgacaaaattacagaattgtcagcctggcaaaaaagaaacaaagaatatttagaaaaaaaagcgcttgaaaaagcggaagaagctgaaactgaggaaactgaaagcgaagaaacacaagaagacgaagacctttcagaaaaagaatcagcttccatctcagaggaagaatctgacgaaataaaagagtctgaagaggaaaatgaatctgaggccgaagaggatccagaagcagatggagaaagttcagaaggagaagaggatgatccggctgtagaggagctaaatccttcagagaaacaagagaaaaagccttcattttttaaaggcttaaagacgaaaaaaccaaagaaggaaccaacagtggcaaaacgtcacatctatcgtgcccttccggttatcggaatcagctcgattgtcgcccttctctcaatctattttttaagtcccttgtccacacagaaagtgattgaattttcagggaacaaagcggttgaccagcaactcttgtatgaaaaaagtcgcatcaaagaagaagattatactctgacgaccttccttcataaatcggtctatgaacaaaatatgaaaaccgctagtccatggatcaaagaggttcacatgcattatcaattcccagtgacctttaaagtcaatgtcgtggaacacaaagtggttgcctattatgtgaccggagaagaccactatccagtattggaaaatggagaagtggtggagacagtaactccagcttcggaattaccgtcctcctatattagcttgaaattctcagatcgagaattggtcagacaatttgtccaagaaatgaaatccatttcttcttccattacggataaaattgtttcggttgatctgacaccaagtaaggtcaccaaggatctggtgaccatcaccatgaaaaacgataataaaatcttggtgcctgtttcccaaattacccgcaagcttccttattataaagccattagtaagcaattagacgatgattcgactatcgatatggaggctggagttttcagctatagtgaacaatccattgcagatgccaaagagcaagctgaaaaagaaaaggctgaaagtacagaaaagcaagaaaaacattctgaggaagcaagccaagaacagaatccagaaggagagaattcttctgggaatgagtaaagcccataaattatctcaaataattgaagaaaaaatgtccattttaggcttctttgtgatataatgaagtttggatagttccaactaaaagggctataaatagatgtaaagtgaaaacaaataaagagagaggactggtgtaatggctagagacggcttttttacaggtttagatatcggtactagttcaataaaagtattggtggcagaacatgtcaatggagaaatgaatgtaattggagtcagcaatgcaaaaagtgctggcgtcaaagatggaattatagtagatatcgaagctgcttcaaatgcaattaaaactgcaatcagccaagctgaagaaaaagcagggatttcaatcaatctagtcaatgttgggttgcctgcaaacttactacaaatcgaagcaactcaaggaatgattccagtcacaagtgattcgaaagaaatcacagatgcagatgttgaaaatgttgtcaaatctgcactcacaaaaagtatgacaccggatcgtgaagtaatcaccttcattcctgaggaattcacagttgatggtttccaagggatccgcgatccacgcggaatgatggggatccgacttgaaatgcgtggccttctttatacaggacctcgtacaatcttgcacaatctgcgtaaaaccgttgaacgtgcaggcttacaagttgaaaacatcatcatttcaccgcttgcgatgatcaaaacagtcttgaatgaaggcgaacgtgaattcggagcaacggtgatcgatatgggtggtggccaaacaacggtggcatctgttcgtagccaagaacttcaatttacaaatatctaccaagaaggtggcgattatgttaccaaagatatttctaaagtattgaaaacttctcaaaaattggcagaagggttgaagttcaactatggtgaagcctatgtgccatctgctggaaacgaggtcttccatgtggaagtcatcggtgaagtagagccagttgaagtgactgagaagtacttagcggaaatcatttcagcacgtatcaaacacatctttgagcaaatcaaacaagaccttgagagaagacatttgttggatcttcctggtggtattgtgatcatcggtggaggtgcgatccttcctggtgttgaagaattggctcaagaagtctttggtgtaaatgtgaaattgtttgttccaaatcaaattggaattcgcaatccagcttttgcccatgtaattagcttgtctgaatatgcaggcaatttgacagatgtggatattattgctcaagctgcggttcatggagacgaagtcttgcgtcaacaaccgattcaatttgatcgtcctgtgcaaccacaagtacaaccacaacctgctgctccagcacaaccggtagtacctgcgtacaatgctgagaagattgaatctccagtggatgctcaagaaattccagcagcaagcaatgatggcaaacaagaaccaaaaactacattcacagaccgaatgaaaaatttgatcggtaatatgtttgattaaggagtgtaagtatttatgacattttcatttgacacagcagcggcacaaggtgcagtaattaaagtaatcggtgtcggtggcggtggcggtaacgccatcaatcgtatgattgacgaaggcgttgccggtgtagaattcatcgcagctaatacagatgttcaagcactttcaagtgctaaagctgaaacagttatccaattgggtccaaaattgactcgtggattgggtgctggaggtcaacctgaagttggtcgtaaggcagctgaagaaagcgaagaagtattgacagaagcgttgcaaggtgcagacatggtcttcatcactgcagggatgggtggaggatctggtacaggtgctgccccagttatcgctcgtattgctaaagcagttggtgctttgacagtagcagttgtcactcgtccattcgggtttgaaggttcaaaacgtgggaacttcgctattgaagggatcaatgaacttcgcgaacatgtagatacattgttgattatttctaataacaacttgcttgaaattgtggacaagaagacaccacttcttgaagcgttgagtgaagcagacaacgttcttcgtcaaggtgttcaagggatcactgacttgatcacaagtcctggattgatcaaccttgactttgcagacgtgaagactgttatggaaaacaaaggaaatgccctcatgggtattggtgttggtagcggtgaagaacgcgttatcgaagcggctcgtaaagccatttactctccacttcttgaaactacaattgatggtgcagaagacgtgatcgtcaacgtaacaggtggtttggatatgacattgatcgaagctgaagaagcttcagaaattgtgaaccaagctgcaggtcacggagtgaacatctggttgggtacatctattgatgaatctcttaaagatgaaatccgcgtgacggttgttgcaactggtgtccgtcaagacaaggtagaacgcgttagcggaattgcttcctcacaacgtccttataaaacaggaccacgtgaacaacgcccacaagctgcaccatttgaccgtgaatttgatttgaaacaagatgttgaattgccaacaactccaagtcgtccagcggtagaaccaaaccgtggctcagcctttggtgattgggatattcgtcgtgagaatatcgttcgccaaactgaaccaacatcaacacatcaagttgatcgttacgtagattcatcttcagatgatgatgaattggaaacaccaccattcttccggaatcgttaatcatgaatctggtagagaatgctgatcttgttcggcaacaagtagaaacagcaagaaacaaagttaaccgtcaagatcaagttaatgtgatagctgttaccaagtatgtggatgttgccacaacagaagcactggtgaaaacaggtatccaacatatcggtgaaaatcgtgtcgataaattcctagaaaattatcaagctctaaaagagtatgacctcacttggcacttgattgggagcctccaacggcggaaagtaaaagacgtgattaatctcgtcgattactttcatgccttggattcggtgaagctggctcaagaaattcaaaagcgagcagaacacccgatcaagtgtttcctccaagtgaacatttctggggaagaaagtaagcatggatttgcacccgatgaactggatgatgttttagcggaaatcgcacagctggacaaaattgaaattgttggtttaatgacgatggctccttttgaggctagtcaagaagagttgcaggatattttttcaaaaactcaccaacttcagaaacaactagaaaagaaacaattaaaaaatatgcctttttcagaactaagtatgggtatgagtcgtgattttgaagtagccattgcgaacggagcgacttatgtaagaattgggacatcattttttaaataggaaagaactatgtcattaaaagataaatttaacaactttattgactacttcacagaagacggtgaagaagtagaagttcgcgaggcaaaagcagctggggcggaaacacaaccagttccacagccacagccgactcctcaagtgacttctccacgtccacagattagtcaaagagaaccagtaaaaccaaaaccgactcctgtcgcacctgttacgactccagtgtctacagcggcagtgaaggaacctgtttcaacaacgaaaaatacatctgaaaatattactcgcttgcatgaacgtcaacgtgaattggctgctaatcgtgcgaatacagatgaaaagattaccattgatgtacgctatccccgcaaatacgaggaagcgactgaaattgttgatctattactatctaatgagagtatcttgattgacttccaatatatgactgaagtacaagcacgtcgttgtttagattatttggatggggctcgttatgttttagcaggaaatcttcgtcgtgttgcaagtaccatgtacttgttgactccaattaatgtagtcgttaacattgaagatatccgccttccaaatgatgtggaagtgacagaatttgactatgatatgaaacgtaatcgttaagatgattatctttcaatacctatcaaatatcattcaaatctattccatcattcttgtcatctatgccttactatcttggttccctggggcacctcagagtactcttggacaaatggttcaccgcctagttgaaccatttttgagcctttttagaaagttaccattgcagtttgggggcttggattttacagttctagtagcacttttggtcttgaacttgatgaatcagttattagcccgcttgttcctacttttgattggatagaatacgatgggacagacagagatttaccaacatttcaatcgcgaagatcacgaattcattgatcgttgtattgaattgtctgaaagagtagtggaacgctattctgttgaggtgacgggttttttaaaccctcatcaggtcactattttacgaaatgtcgcggcaagctaccaattacaggtctttgcttccagtgatgagcagaaaatggagtatgctaaggttattgttgctccggattattaccaattggatccaagtgactttgatctggccttattggaaatggtctatgcttcaaaatttcatcacttgacccattcccaggtactggggaccattgttcaccaattaggtgtggagcgcaagtcctttggagatattctgacgagtgatggaaagatccaagtatttgttgaacagcgttttgttccctatttcatggatcacatccagaaaatttctcgggtacctgttaagctgagggaagttcctctatctgaacaaatgatcgtagaggaagaaagccagcagcgagatattctagtgtcgagttatcggttagataaggtgattgctgggaccttcaagctttcgcgctcacaagctagtcagttgattagatctggtctagtgaaagttaactatgcgactacttccaatgttagctatgctgtaggtctgaatgatttagtcagtgtccgacgctttgggcgtcttaaaattgtttctgaaaatggtatttcaaagagtggaaaatataaagtaactgttgaagtactcttaagtaaaaaatgaggaggagttatggctcttactgctttagaaattaaagataaaacttttggcgttaaatttagagggtatgatgcgaacgaagtagaagaatttctagatatcgttgttcgcgattatgaagatcttgttcgtttaaatcatgatcaagaagcaaaaattcaagctcttgaagaacgcttaaactattttgatgaaatgaaagattcattgagtcaatctgttttgattgcacaagatactgctgaacgtgtcaaacaagcagctaacgaacgttctgaaaatattgttcgtcaagctgaacaagatgcacagcacttagtagatgaagcaaaacaaaaagcaaatgaaatccttcgtcatgcaacggataatgccaagaaggttgccgttgaaacagaggaattgaagaataagacacgcgtcttccatcaacgtttgaaatcaacaatcgaaagccaattgagcattatcgatacacctgaatgggatgaaattcttcgtccaacagctatgtacattcaaacaagtgatgaagctttccgtgaaattgtggagaaagctttgggtgaatcagttcaccatcatcatgcagaagatgataacattgatttgactcgtcaattctctccagctgaaatcgaagaattgcaaaaacgcatcgaagctgctaatttagaattgggtgcaacacaagcgtttgaaggtttgaatgaaaaagttcaatccgctttagaagaagcagagcacgctcgtcatgaaaatgaggaagtcgttgcggttgaagaaactgttcaaccagaagatgatgcaaatcgtgaatctgtcaatattttataattttgtaaaaacaggtccattaatgataggtctagcgagcagatgatggtggaagatctgcactccctcttaatggatgatccttttacagtattcgttctgaacccttgagtaagaacggacgtttccctcgttacgggatgagaggagaaggtcgcttgcgacttctcgaacaaaggtggtaccacgagcaatcgtcctttttaggatgctcgtgttttttttatagcttttaaatcaataaggagacataatgaaactcaaagaaacattgaatcttgggaaaacagcttttccaatgcgggctgggcttccaacgaaggaaccagtttggcaaaaagaatgggaagatgcaaaattgtatcaacgccgtcaagagttgaatgaaggaaaaccgcattttacccttcatgatggccctccctatgccaacggaaatattcacgtagggcatgccatgaacaagatctcaaaagatatcattgttcgttctaagtctatgtcaggattttacgccccttatattccaggttgggatacccatggtttgccaattgagcaagtcttggctaaacaaggtgtgaaacgcaaagaaatggacttggttgagtacttgaaactctgccgtgaatatgcgctttctcaagtagataaacaacgcgaagacttcaaacgcttaggtgtttcaggtgattgggatcatccttatgtaaccttgacgcctgactatgaagcagcgcaaatccgcgtctttggtgaaatggccaataaaggctatatctaccgtggagctaagccagtttactggtcttggtcttctgaatcagccctcgctgaagcggaaattgaataccatgatttggtatcaacatctctttactatgcgaacaaagttaaagatggtaagggtgtcctagatacagatacctacatcgttgtttggacaacaactccatttacggttacagcttctcgtggattgacggtgggtgcagagtttgattatgtcgtagtgaaacctgctggatctgaccgcaagtatgtcgtagcatctgagctcttgccaagcctttctgaaaaattcggttgggaaaatgctgaagtccttgcaacttaccaaggaaaagaattgaaccatatcgttacagaacatccatgggatcctgaagtggatgaattggtgatccttggtgagcatgtaaccctcgattcaggtactggtatcgtccatactgctcctggttttggtgaggatgactacaatgtagggattgccaatggcctcgaagttgctgttactgttaacgaacgcggaatcatgatggaaaatgctggccctgactttgctggtcagttctatgacaaggttgttccaactgttatcgaaaaacttggtgatttgcttcttgctaaagaagaaatctctcactcctacccatttgactggcggacgaaaaaaccaattatctggcgtgcagttccacaatggtttgcctcagtatcgaaattccgtcaagatatcttggacgaaattgaaaaagtgaagttccactcagaatgggggaaagttcgtctttacaacatgattcgtgaccgtggtgactgggtcatctctcgtcaacgtgcctggggtgtgcctcttccaatcttctatgcagaagatggaacaccaatcatgacggctgaaaccatcgaacaagtggcgcaactctttgaagagcatggttccatcatctggtggcagcgtgaagctaaggatctgcttccagaaggatttacgcatccaggttcaccaaatggcgaatttacaaaagaaacagatatcatggacgtctggtttgactcaggttcatcatggaatggggttgtagtgaatcgtccagaactcaaatacccagctgatctttaccttgaaggttcagaccagtaccgtggttggttcaactcatctcttatcacatctgtggcgaaccatggtgtcgcaccatacaaacaaatcttgtctcaaggttttgctttggatgggaaaggtgagaagatgtctaaatctcttggaaataccattgctccaagtgatgttgaaaagcaatttggtgccgaaatcttgcgtctctgggtaactagtgtagattcaagcaatgacgtgcgtatctcaatggatatcttgagccaagtgtctgagacttaccgtaagatccggaatactcttcgtttcttgattgccaacacttctgactttaatccagctgaggatgcagttgcttatgacgagcttcgttcagtggacaagtatatgaccattcgctttaaccagcttgtcaagaccatccgtgacgcttatgctgactttgaattcttgacgatctacaaggcgcttgttaactttatcaacgttgacttgtcagccttctacctggattttgccaaggatgttgtttacatcgaaggagctaaatcacttgaacgccgtcaaatgcaaacagtcttctatgatatccttgtgaaaatcacgaaactcttgactccaattcttcctcacactgctgaagaaatctggtcttatcttgagtttgaagcagaagactttgttcaattgtcagaattgccagaagcagaaacgtttgccaaccaagaagaaatcttggatacatggtcagccttcatggacttccgtggtcaagcgcaaaaggccttggaagaagcacggaatgaaaaagtgattggtaaatcacttgaagctcacttgacagtttatccaaacgaagtcgtgaaaacacttcttggagctgttgatagcaatgttgctcaactcttgattgtttctgaattgacaatcgcagaaggaccagctccagaagatgcagtgacctttgaagatgtagccttcacagttgaacgtgccgctggtgaagtttgtgaccgttgccgtcgcatcgatccaacaacggctgaacgtcactaccacgcaaccatctgtgatcactgtgcaagcatcgtcgaagagaactttgcggatgcagtcgcagaaggatttgaagctaaataaaagccattaaaagaagttccataaaggaacttcttttttaatggctagaatagtgtagagatttatgtattagggaaagaaaaaagtaaggcaaattggccttactttgtaattggaaaggaaatttcaattagtttatcggagtagagggttttaatagcggattggtcaatgatttgaagatcaatcttacgttttaaaaagaactcacgaattttttccacttcagtttcacgaatagcacggtgtttgttactgatcaataattcatagtgtgttggggcctgtgtaaaaacaacatcggtattgcccgcggaataaacctcgacaagcaaggcgtcagtgctggcaagttggcttttgaccagtgcagcatgactatttgtggtattaatgagcttcatatgagttcctcctaacctctatcttcatttattatagcacttttttattttttgtgaaagaattcctttattttttatgggtatttttccactgttcaatgccccatttgtgactgccacgtttgagtttttcaatcgcttcatctacaggaaaccaagcaagattgttaaaatcttccagtggtttttgagcctctgtatagtctaccacttcataaatataggcaggattgtagtagtaggtgtcgcgatgactggaatagaaatactcatctgcttggccatagtattgccctaaaatagcggtaaagcctaattcttcgatcagttcccgtttcagagcttgcaagtgatcttcacctgcctcaatttccccgccaggcaagaaccaagccccatttggagcttgaacgaggatgatctgatccttgtccttattgggaataacagcgtagacaccatagcgattgacgtaggtcacatcttgttttttttcaccaaaacttggaatggtcatggttttctcttttcttgttttttcatcattatatcatattttttagcaaaaatctggagggaaaaaagaaagaggatgggacaaaagtcctagcctctcaattatttttggattgtcgagcaagacgcagtggttgagtgggctctactacgctgatttcatcagcttttacagccctactcaactgtgcggaggtgggacgacgaaatcgaattctaacgaattaccgatttctgtcccactctctgaatgtacatttactgattatgattctaacttcttttcagccgtcttgtgaacagctttgatactaatattcccattgctggtcatgacggctttgagttgtttttcacttggatgttccaggtaataatcggtaatagcatcttcgatatggtcttggatggtacgacggagtgggcgggcccccatttttggatcgtaacccagatcgaccaatttttctttgaccttctctgttacatccagatgaatctcattttgtgcgagacgttgattgacttcatcgagcatgagggtaacgatttggagaaggttttcttttgatagaggttggaattcaatgatcccatcaaaacggttcatgaattcagggctaaagaagttaccgagttctccaagtacagagttggttcgaccttcgcgagcagctccaaaaccaacattggcctcagctttgccggttccagcattagaggtcatgatgataatggtatctttaaagctgacggtacggccttgaccatctgtcaaacggccatcatctaaaacttgcaagaacatgtgcatgacgtctggatgggctttttccacttcatccaacaacacgagagagtaaggattgcgacggaccttttccgttagttgtccggcttcatcgtagccaacatagcccggaggagctccgactagtttcgctacgctatgtttttccatgtattcgctcatatcaaagcggatcatattgtctgcagagccaaagagctcgatcgccaattgtttagacaattcggtctttccgacaccggtaggtccgacaaagaggaagcttccgatcggacggttaggtgatcctaggccaacacgattgcgtcgaatggctttcgcgattttatctacggcatcgtcttgaccaatcacatgagctttcaaatcagaagccagattgatcaattgagactgttctttttctttcaaatcaccaacaggaatattggtcttttgttcaacgatgtgttcaatcgttttttcgctgatgacaggggtctcttgatcggtgacatgttgaccttgcatttccttgtatttcgcgatttggtcgcggaagtaggctgctttttcaaagtcttcttcgcgggttgcttgagctttgaggttttccgcttcaatcaagcgctggtcgatcacttttggatccacaaagtttagggtcaggttcattttagatcccgcttcatccaacaaatcaatggccttgtctggcaggaagcgatcttggatgtagcggtttgacagaatagctgctgcttcgatggctccgtctgtatagtggacgtggtggtagtcctcgtattttttctggatgcccttgaggatggtgatggtttcttcaaccgttggctcatcgaccttaacgggctgcatgcgacgttccaaggccgcatctttttcaatgatacggtattcattgagggtagtagccccgactaattggagttctccgcgcgctaaggctggtttgaggatatttccagcgtccatattgccttcgccagctgatcctgcgccaacaatttcatggatttcatcgatgaacagaataacatcttcgcgttgacgaatttcatccattaatttttgcatgcgttcttcgaattgaccacggatgcctgtgccctgaacgagactgacgacgtctaggcggatgacttcttttccttgcaatttatgaggaacgtcgccatcgacgattttttgagccaggccttccacaacggcagtttttccgaccccaggttctccaatcagaaccggattgttcttggttcgacggttgaggatttcgatgacacggataatctcctcgtcacggccaatgacagggtcaatatcccctttgcgggcaatttctgtgacattgatgccgaactcttctaacagtccttttggcttttgagggcgtgcttgacgagggtcttgaccaccaccacggttattgttttggccgtagccgccacctccataactgcctccggattgagttggaggagtttgaggttcttgtggactttggaagtttccaaggttattgaagaaatcttcaaaaggatctccagtgagttggctccgttgtgtcatgcctttcaagaagctgttatttgggtctgttttcataattttatagcaattttgacagaggtctacttgctgctgacgtccatttacatttgtatataaatggatggttgattcatttattttacaattttgacaaagcatatacatacctcacagtaggtttttgatggttttccatcaagagacgagcctattttcaaaaggtcaaaaatagtcaaagatttatagtttcattatatcagtattctagaagtttgcaagaatttgctacggaatgtcgctaaggattgaagaaagagcaaatcaatggaaaaatgtgaatttttattggaagagctttctcttttatgataaaataggagagtagaaagtaaagaggagaaataaaatggaatcacatttagtacggattatcaaccgtttggagacaatgacaaaagacggtggaaacttgaaacgtaattttgaacgtgacggtgttgttgtcgctgaagtagcctacaaccacaatgaagaagaaggttcaacctttacacttcgtgatgttgaagcgcgtgaaacctatacatttgatagcattgatttaattgcaatggaaatttatgaattgctttactaagcagctgtgtggatgagtttggggtggtctcaagctcattttttgtccatctggctatagttttcgtctataagaaattctaattaggaacagttaggtttgagagttgaaatctgctataatagagaggactattttcattacttgactagaaagagaattgatatgacgacactcattgatgggaaggcgctcgctacaaaattacagggtgagattgcagagaaaacagcacgattaaaagaagagacaggagttgtgcctggcctcgttgtcatcgtggtaggagataatccagctagcaaaatctatgtaagaaataaagagcgttctgctattgcggcaggctttcggagtgaagtgagacgacttcctgaaagcatcagccaagctgaattattagaagtgatcgaacactacaatcaggatcccctttggcatgggattttggtgcagttgccactgcctaagcatatcgatgcggatgcagtccttttagcgattgacccggcaaaagatgtggatggctttcatccattgaatatggggcgcttgtgggctggaaatcctattatggtgccatcgacccccgctggcatcatggagatgttcaaagagtacgggattgatctagaagggaagcgagcagtcgtgattggtcgttccaatatcgttggaaaaccaatggcgcagttgctcctcgccaaaaatgcgacggtaaccttgacccattcccggacccatcatctgcctaaaattgctagaagagcagatatcttggttgttgcgatcggtcgtgcgaaatttgtaacagcagacttcgtgaaagaaggtgccgtcgttattgacgtcggaatgaatcgcgatgagaatggcaaattgtgtggggatgtcgattttgactccgttgcccctttggccagtcatattactccggtaccaggaggggttgggcctatgaccgtcacaatgctgatggagcagacctacgaagcagctgttcgtgccttaaaaaaatgaaagtgtgaacaagatgaagtttgtatttgatttagatggaaccctgtcattcgatggtgtcacaatcgatgatgaaatcaaacaggtcttattgagagcagaagaatttggtcatgaagttgcctttgcttctgcacgttcttaccgggactgcttgggccttttaggagatccattgagtcagcaactcgtgataggcttaaatggtggattggcctatcgccaggggcaattggtatatgaggaacaattggacaaggatgtgtatcgggaagtccttggcttttgtcgccattacaatctaccattttttgtggatgatacctttgattatagcggacagattttggaaaagattccttttgttgcgaatgtagatcccctcaagaaagcccagtatcggtctttagaggagctgacagatccgattaaggtcgtgatctatatgggtggccatgaggagctcgtggatgagatcatcgagcggattgaaaagacagacaaggcccatatccgctatcatgcgcatgaaaaatgcatctatctcaatccagcagacacgcataaagcgacaaccgtagaagaactctgtggagagaatttcgtggcttttggcaatgatcaaaatgatatcgagctctttgaaaaagctctttatgcagttcagattggtgattttccagcccttcagccttatgcggatgatcaattggtagccaaacaaaatcaaccacaagctgtggctgctaagatcttgcaagtcttcgcagaattcagaggaaaataaaagatggagggggagtcgtggcttctcctttttcgctagaaatgaggaaggtatgaaaacagttcagaaagaagagatccaacgtgtcattgcaaagcgagaggtgaattcttataagggagattttggtcgcctgctcttgattggggggacttacccctatgggggagccatcattatggcggcgcttgctgcggttcatagtggtgcggggctggttactgtcgcaacagatcctgataatctgacagcccttcatagccatcttcctgaagctatgggctttgatttggcagatcacgaactcctttgtgagcagctccaaaaagctagcgtgattctcgttggaccgggcttaaaggaagcaagagaaaaccaagcaatcttgcacatgatttttgaacaagtctctagccagcaggtcttgatattagatggaggagctatcagtctttttacagcctctcagtttgacctgccagaagctcagttggtctttacccctcatcaaaaagaatgggaaaaactgtcagggattgatcttgcaagccagactgaagacaagagtcgaagagcagtacagaactttcctcaagggactgtcattgtagaaaaagggcctcacacccgcatttggacaagtgggcaagaagagggctatcagctagatgttggtggtccctaccaagcaacaggtggcatgggggataccttggcagggatgatcgcagggtttgcaggtcaatttccacaggttagtctctatgagcgcgtggtggttgcgacctatcttcattcagccattgctgaagacttgagcaaggaggcttatgtggttctaccgacaaccatcagccaagaaatccccaaatggatgaagaagtggagtgacaattcaaacgaaaatgttgaaaatgaaacgttttcatgatagtatggatgaaaggaggtgagaaaatgaatgagcaaaaaaaatcgattacgatgaaagatgttgcagcagaagctggggttagtgttgggaccgtttctcgtgtcatcaataacgaaaaaggcattaaagaggtgacattaaaaaaagttcaacaagcgattgaaaaactttcttatgtcccagatgaatatgcgagaggcttaaaaacgaatcgtagtaacattatcgctttactcattccaaccatttggcatccattcttttctgagtttgcttatcatgtagaaaaggaattattgaaaaatcaatgtaaattattgatttgtaatgcagataaagatgctcaaaacgagatagagtacataaaattactagaaaaaaataaggtagatgggatcattgggatcacctactccgatatcgataagtatatctcctctaatttaccttttgttagtattgaccgtcatttttctgaaaatgtctattacgtaacctctgaaaattatcatggtggtcaactggcttgccgagaattagtcaaacgaggttgccaaaatttagcatacattagtggtgtgaacaaacatttgaatgaaacaacggaacggggaagggggtttaaagatgaagctaagcagcaaaatacaaaactctgtagtcttgaaatgccagaaccgttagatcaagcagaaagacaaattaagtccttttttgaagctcatcctcagattgatgggatttttacagtaaatgattttatggctctacgtgttataaaagttttgacggagatgggaaaaactcctctagaggactatcaaattattggttttgatgggttaagacctgcttttgatcaaccgtacttactttcgaccattgttcaagaaatagctcagatggcccaagcggcagtagaattattacttaaattgattcgtaaagaaaaaatagaaaagaatgtgattagtttacccgtacatttctttgaagggaacactacaaaaaaattataaaaagtgcttgacaaattatgaaagcgctgttataatttagctataaaatgaaacgtttcaaaaaactcaactattttagcttgagttaaaaatataaccaaaaatgaaacgtttcaaaaaggaggacgctatgcgtaaaggtattaagttatctgtagttgcagcactatcattaggattgcttgcaggatgtggtgggggatcaaaatccaaaactgcaagttcttcaaatgagattaaagtctgggttcagttctcagatgaaacagctgagggaaaagcttggcaacaagttgttgataatttcaacaaatcaaagaaaacgaaatataaggttgtgacagaatttattccacgtagcggtagtggtggtggatatgaagataaggttaacgccgctgttacgacaaatagtttaccagatgtcattacactagatggtcctaatactgcagcctatgcaaaatcaaaagtgattgctcctttggatgattatctaaaagacgataatatggatgatgtactggacagtattaaacaacagggaacttatgatggtaaattttatgcatttggttattcagaatccaatgtaggtgtttactataataagaaaatgtttaaagaagctgggattgatgaagctagtttaccaaccctagaaaaaccatggacttggtctgagtttaatgccattgctaagaaattaaaagatcattttaacaaaccagcaattgatttccgtttgaattcaaacgatgagatgttgccatatgcttacatgcctcttatttggtcaaatggtggatctgttgtgaattctaaaggaacaaaagcggaaggctacttcaatagcaaggaaagtgttgaagctgttcaatttattcaagatcttgtgaaggatggatatacgacagttagtcctgttgaaaaaggttttgaaaccggtgaatatcctatggttctgagcggttcttggacgattgcagacctacaaacaaattacaaagatattgattttggtattcttccttatccagtttcagataaaacgaagaaattggtatcaccttcaggtagttggcaattagccgttacaacaaaatctgataaaaaagaagcagccgctgaatttgttaagtttgctacaaatactgaatctagtgaaatcctaagcttaggtaacagtgttcttccaatcagaaaatcaacaattaaaaatattaaggacaaagtatctgagccaatgcgtttcttgatggaacaaaatgctaaaacggctcatgctcgtccagttgtagtagcttatccacaagtttcacgcgctttccaacaagcaatgcaagatatcagctattataaagataatccagatgtacaaaaagtattagatgctcgtgcgaaagaaatgcaaacagcaatcgaccaatctttaaataaatagttgacattcaaaaaggtggaaggtaagttatggaatgtaccttccaccttattttatttaatagtttcatcttaggagacgaacaatgagcgaaaaaaataaagtcgaaacaaaaaagaaagaacgccttaaagaaaatattatgggctatagctttttagctccagctttaatattgcttttcatctttttagtgatacctgttggtatggtgatctattatgcctttacagattattacctattaacgcctgaggatagaaaatttgtaggattacaaaatttcatgcgcttagcacaagatccaatctttataaaaagcttcttgaataccttgaaatttgtagtttggattattccagtgcaacttggtgcggctctcgggatggccttaattgttaataagaaacgtaaaggaaatatgttctttaaggtagcattttttgctcctgttgtgatgtctcttgtcgttatctctatcctctggttatacttgttaaatccaaataatggtttgctcaatgctctactgaataaaattggtatttcttcacaaccattcttgacaagtccaaaacaagccatgtatgccattgtatttgtttctgcatggcaaggtgcaggttatcaaatgttgttattccttggaggaatgcaaaatattccacaagatatttatgaggcggcagagttggatggattttcaaaatgggctcaatttagatatatcacgatgcctttattgaaaccaactgccttgtttgtactcttgacgacattgatttcagcatttaaattgattgtgcaaccaatggtcatgactcaaggtggtccattgaactcaacaatcactatggtatattacatttatcaacaaggtttcactgaccgtcttgttggttactcaagttcgattgccttagtatttacaacattgattggtatgattagtcttgtacaacggcgagttttgaaggaggatgattaggatgaaacgtttaaaaccgactactattttagaatatgttttattaattctattagcaggcctctttctatttcctatgatttggatggtggtttcagcaatgaagccagaagcagatgtgtataagaatttaacaagttggaaagcattcttacctagttttaatccagctgattggtttaaaccttaccaagaagttcttgcccgttttagtattctaacatatctagggaacagtattttttatgcaggaacatttgcacttgggtctattatagtaaacgccttagcgggatttgcatttgcaaaaattaattttacaggtaaaaaaattctgtttggctttttattggccttgttaatcattccgatggaaacagtgttgattcctcaatttacaattattaattcacttggcttagtcaataatcgtttagcggttattatccctggattagctagtgtctttaatatttatcttttccgaaacttctttattgccattccagaagaaattatcgaatctgcaaaaatagatggcgcaagtatcttacggatctttttcaagattatgttgccgatgtcgaaaccggcagtcgcaacagtaggtgttctttcctttatttctagttggaatgattatatctggccgttgatggttttaaccgattcgtcaaaattttcaatgcaggtggcgattacaaccattaatacaactcaaccagtttatatcaatcaagtaatggctgttttgacaatttctacaattccacttattctagtatatatcgtagcacaaaaatatattattcaaggtctaggtggatctggtacaggtattaagtaggtgatcagtatgaaggaaagcattcgaaaagtaaatcagtatatcgatgaaaacagggagaaggttgaccagcaatatagaggagcatttcatttgctacctccaatcggctggatgaacgatccaaatggctttgtttatttccgtggggaataccatttgttttaccaattctatccctatgatagtgtttggggtcccatgcattgggggcatgccaaatcaaaagatcttctccattgggaagaactgccagtagctttagcaccaagtgaaagctatgataaggatggctgcttctcgggtagtgctattgtgaaagatgacaagctctatttgctgtatacgggtcatgtagacgatgaggaaaagcgcgaggagactcagtgtcttgcggtttcgacagacggcattacctttgaaaagttgcctactaatcctgtgatccatgctcaccatattgaggggatcgcagatattgcagattttcgtgatcctaaagtatttgaataccaaggaagctattatgctgtcgttgcttctaagacaccagatgacagaggacaaattctcctatttgcatcaagtaatctagtagattgggcctttacatcagttcttttagaaggtgaaaaagggcaagggattatgtgggagtgtcccgatttcttccctttagatggcaaatgggtcttgatcctgtctccaattgaaatggaaaggcagcaagaaaaatactggaacttaaattcgacggttgcctttatcggtgacatgaattgggaaacaggacgctttcatgtcgattcctatgatgaattggatggtggtttggatttctatgcccctcaaacttgtcaaggaccaaatggcgaacgatacatggttgcctggatgcaaatgtggcaccggtctatccccagtcatgatttagctcatgggtgggcaggtagtatgactcttccaagaaaattgtctctgaaagacggacgattggttcaggagttacctgagtcagtgaaagaacactttcttgtggagcatgcgtcagaaaccattgttaagggcaatcaaatcattatcccagctagagggaaacaaaccttgtttgagctagatgccaaaccgggtcgctcctttatccttggttatggcgaggaaactgatcctgatcgtgtcttgcaattggtttacgacgcctctcaaaaacgctttagcttaagtcgagaccaatttgggcacctcattactggaaaagaaaatccagcatttcaatcgagatggattcagttggatgctgaaaaggatcatcatttttcgatcattcgcgataccaactcaatcgaagtattcgtggatggcaaaactctctcgatgaccttttatgaaacgagtcaaaatcccgtctataccctcacggcagatgaagggatcgattgggtcgtaaaaacctatcaaaaataggaaatcaatagcctcctaaagaataaaagacaagtcttgtgacttgtcttttttgtgtattccaacttggtcttgagtttcatcgaagaaaatttgggaattggtctcatgaccgatctgactctctttccagaatatccaaatgttgtcaaaattccgctggttgaagaggaaaaaacagtcttctatattagttatgcctatccaaatgaaggggaaccccaagcgcttcttagctcctttattgaacggttagaaaagtgtgaaagataaggaagctggtgtcaaacagacaagtagagggtaacttgaataaaatgaggcttgtagagaaaggaaattcatgatttcgctttgtctgccagccttttttggtgttttttggtataattaaacttgatcatattctacagaaaggagttcctatgtccaactatttatccgtatcaagtttgaccaaatatttgaaattaaaatttgataaggatccctatttggaaagggtttatctgacagggcaggtctccaatttccgaaaacgtcccaaccaccaatatttttcattaaaagatgaaaaagcggtcattcaggcaacggtctgggctggggtttatcgaagctttggttttgagctagaagaaggcatgaagatcaacgtcatcggtcgtattcagctctatgagccaagtgggagttattccattgtcattgaaaaggctgagccagatggggtaggggccttggccatccaatttgagcaactcaagaaaaagttgaccgaagaagggctctttcaggaccggtggaagcaagctctgccacaattttcaagaaagatcggggtcatcaccagtcaaagtggggccgtgattcgcgatattatcacaacggtgagccgacgcttccctggtgtagagattgtgctctacccgaccaaggttcagggagaaggcgcatctagtgaggtggttgctaatattcaaagggctaaccaacgggatgatttggatgtcttgattatcggtcgtgggggtggttcgattgaagatctctgggcctttaatgaagaagcagtggtgcgagccatttttgaatcgcggattccgattatctccagtgttggacatgagacagatacgactctagccgattttgtagcagaccgacgagctgctactccgacagcagctgctgaattggctactccagtaaccaaattggatctcttgtcccatttacaaaagcaggaaaatcgtatggcaacagcaatgtccaatcgcttggcctataatcgtgaacgcttggccaaattaagtcaatcggttatttttagacagcctgaaagactctatgatggctacctgcaaaaaattgaccagttgcaattgcgattgaaacaaggaatgcgcgatgcttatggacaaggggccaatcagctgcaaggtctgcgtcatcgcttagaagccacgtctcctttgcatcgtattgagcgctaccaggaccgcctgctccaagataagagaatcttaaccaaccgaatggaacaagtccttaaagagcaaaagatcaaggtgcaaggcttatcagaagccctcttgatgctcgataccagtaggattattgcgcgtggctatgccatggttaagcaagacgatcaggttctagactcggttgcgaaagtaacagaaggggaccctctgtcactcatcatgagagatggtcagttagaagtagaggtaaaacatgtcgaaagaaaagaaatttgaagaaaatttagcagatttggaagccatcgtccaaaaattggaaagtggtgatgtggctttagaagaagctattacagaattccaaaaaggaatgaaattgtcaaaagaattgcaagataccttggatcaagcagagaaaaccttggtcaaggtcatgcaagcagatggtactgaagcggatctagcatgagacaagaagaaaaacgaaatagagtagagcaagcggttcgctctttttatgaggagaaagccgttgccccccatttagtggagtcggtcctgtattcgatccaggcaggtggaaaacgcctgcgccccttgctccttctagaattgtttgaggcctttgggctggaattgacagaggctcactttcaagtagcaggggctttagagatgatccatacaggaagtctcattcacgatgatttgccagctatggacaatgatgattaccgtcgggggcaattgaccaatcataagaaattcggagaagacctggcgattttagcaggggatgcgctttttctcgatccttttggaataatagctgcgagtgcccttcctgatgcggtcaaggtctctttgattcttgaattgtcagatgcttccggtagtcgtggaatggtagctggccaagtccttgatatggaaggggagcacaaacagctcactctagcagagttgcagaccatccatgccaataagacaggacgcctccttgcctatcctttcatcgcagctggtttgattttagagttgcaagcagatattgctcagctcttaggaaaaatcgggaaaaaattaggcctggcttttcaagtacgggatgatattttggatctggtcgctgattttgaagctttggggaagacccctcaaaaggacttagtagctgaaaaatcgacctatccagccctgttgggattggaagaatcaaaagctttgctgacaagcgaattagacgcttgcgaggacttgttggatcagattacagctgcttgtgactttgatccgcgagcgatcaagaaattaatagaaggattacgaatagatggctaaggaaagagtggatgtattagcctataaacaaggcctatttgatacccgtgaacaagccaaaagaggggtgatggcaggccttgtcgttgccgttatcaatggtgagcgcttcgataaaccgggtgaaaaaattgatgaagcaaccgagttgaaattaaagggcgaaaagctcaaatatgtcagccggggcggtcttaaattagaaaaagcactgaaccaatttggtttatctgtagagagtaaaattgccattgatatcggggcttctacaggtggctttacagatgtcatgctgcaaaacggagccagtcaggtcttttcggtggatgtcgggaccaatcagttggcctggaaattgcgcaatgatcctcgggtggtctcgatggaacagttcaatttccgctatgccgagccagatgattttgaagcgacaccgagctttgcgagtatcgatgtcagctttatttccttggacttgattctaccagcccttcaccggattttggcagataatggacaagtcgtggccttggtcaaacctcagtttgaggcaggacgcgaacagatcgggaaaaatgggatcattaaggatcctaagattcatttagccgttcttgaaaaggtcgctgcttttgcagggacacatggctttgcggtaatgggagtggattattcccctatccaaggaggccatggcaacatcgaatttttgatgtatctagaaaaaaaagaagagaaaacaaagccgactacagagcagctggaggctgttgtggagcgggcacacaaggaatttaaacatgaagagtaagaatatcagattagaaaaaattcgccgtttcattcgcgatcatgaagtggggacgcaagaagagatcgtcgaacatttgaaagaagaaggcatctcagcaacccaagcgacagtgtcacgggatatcaaagaattgggcatcgtaaaacgccctctgaaagacatgacctatgtctatgaattgccacgtaagcaccaccaagggatcgggatgatcgaaagcaatattttgtctcatcgtcgcatgggagaatatgtcaatttcaccatggttccggggacagcgcctttagttaaacgtcgcttacgggagatttataaggagcatatctttagtattgtcgcagatgatgatacgattttactgatcgcctattcagctccagaagcagagaatatcctcaaatcaatctttgggtggtaagagcctatgctattagaaatttcgattaagaactttgctattatcgaagagatttccttaaattttgaaaagggaatgacggtactgacaggggaaacaggtgcagggaaatccatcattatcgatgccatgaacatgatgctgggaagccgcgcaacgacggatgtcatccgacacggagccccaaaagcggaaatcgaagggctctttaccgttgagagcaatcgccacttgacggctctctttgaagagcaaggactagagtggaccgatgaattgatcattcgccgagagatcttgcaaaatggacgaagtgtcagccggatcaatggtcaaatggtgaatttatctgtcttaaaggcagtcggtcaacatttggtggatatccatggccagcatgatcaggaagaacttatgcggccccaattgcatatcgctatgctggatgaatttggggatgcagcctttttccaaaccaaagacgcttatcgtcagacttttgaagactacaaacgcctgcgcaaacaagtggtggaactccagcgcaaccagcaggaaaacaaggcccgtattgagatgttggagtttcaaattgcagagattgaggcagctgccttggaagtggatgaggacctgcgtctggagcaagaacgccaacgcctgctcaatcacaagatgattgctgataccctaaccaatgcctataccatgctggatgcagaagaattttcgagcctctccaatgttcgctcagccatgaatgatctggaaagtattgaagaatatgatcccagctacaaagagctatcaagccagttatctgaaaccttctatgcccttgaggatattaccaagcgcttagaagatgtggtcgatggtctggagtttgatggcaatcgcctcatgcaggtggaatctcgtttggatttgatccactccatcacgcgcaagtatggtggccaagtcaaggacgtattggaatacctggcgcaaatcaccaaagaatatagccttctcaccggaagtgatctctcgtctgaggacttggaaaaagaactcaaacgtctagaaaagagtttggtcaccttggctcaagatttgagtgatcaacggcatgacctagctcaagatttggaaaatgaaatccagcaagaattggcagatctctacatggacaaggcgcgttttcaagtgcgttttagtaaggctaagtttaatcgtgagggaaatgaagctgtcgaattttacatttcgaccaacccaggtgaggactttaaacctcttgtcaaggtagcatccggcggagaattgtcacgcttgatgttggccattaagtctgctttttctcgaaaagaaggaaaaaccagtattgtctttgacgaggtggatacaggagtctctgggcgcgtggcccaagccatcgcagcgaaaattcataagattggtcaaaatggccaggtgcttgctatttctcacctgcctcaagtcatcgctgcagcagattatcaattctatattgagaaaatcagtgatgaacactcaactgtctctactgtgcgtttgctcaatagagaagaacgaatcgaagaaattgccaagatgctggcaggagaggatctaacggaagctgcccgtcaacaagcagagcaacttctcaagcgttaagagaaagaaggtttgaaacaatgtcaacatactttgtagtcggagatattcatggaaaagcacaaatgctagaagagctcatgacagagtgggatggaaaagctcaattggtctttttaggggatttgatagatcgaggcgaaaacagcaaacgatcgattgaaattgtaaaagactacgtagaccatcacggagcggtttgcctttccggaaatcacgagtacatgtttttagcctggttggacaatccagaagagcgttatgaccactaccgaagaaatggtggcgatacgaccatcaactctctgttaggccggccactcgatgctcctgtagatggcattgcagatgcgcaagcagtagaaaatgccgttcctgacttggtggccttcatccgtagtttgccttttgactacgagacagagacctattattttgtccacgctggtgtggatctaacccttgaaaattggcgagaaaccagtgattaccaaaaagtctggatccgaaaaccattccatgaagcggagaatcatacaggcaaatggatcgtctttggccatacaccagtctatggactgctcaatgagccagtcggcaccgaaaatctttggatttcagatcagaagatgggtgtcgatgggggcgctgtctttggtggagtcctccatggattgctcttggatgatcaaggcattgtccatgaccatgtccttcataatacaggtttttctgccgcagacgactgaggaagcaggaatggatatctttcactgcaaaaccccgtgttttttgatataatgaaagcagaacattcttaggaagagtatagaaatatatggcaaatattaaaatagttacagactcatctattacaattgagcctgaagtggttgaagaatatggcatcaccattgtgccactttctgttatggtggatggagtcctttattccgacagtgagttgggcgaaggggacttcttgcgcttaatgcaatctagcaaaaatcttccaaagaccagccaaccacccgttggagtctttgcggaggtgtatgaaaagttagcagcagacggagctcatatcgtttcaattcatatgtctcatgccttgtcaggaaccgtagaggcggctcgtcaaggagcaaccttatcaggggcagaagtaactgtgattgatagtggctttacagaccaagccatgaagtttcaagtggttgaggcagctaagttggctaaagaaggagcagatctagacaccgttttaggtcgtattgaagaagtcaaagaaaagacagagttgtatatcggcgtatctaccttggaaaatctagttaaaggtggtcggattggccgtgtcaccggacttttgagctcgcttcttaacatccgtgtggtgatgcaaatgaaggaccatcagttggaaccaatcgtcaaaggacgtggaaacaagacctttaagaaatggttggatgaattggtagagaatctttcccatagtaaggtggctgagatcgggatttcttacgcagggacaccagagtgggccaatgaaatgaaggctcagttgcaatcgttcgttgaaaatgctatcccagttctcgaaactggatcgattattcaaacccatacaggtgagaatgcattttcagttttggtgcgctacgaataagctgaataaatgtttgaaaaaacaggtttagtacttgacctaaaggctttttttagatattatagtactgttaaggcgtaaagcctaaaaaaatttggaggatttgttaaatggctaacaaacaagatttgatcgcaaaagtggcagaagctacagaattgactaaaaaagattcagcagcagctgttgatgctgtattcgcagcagtttcagaatacctttcaaaaggtgaaaaagttcaattgatcggtttcggtaacttcgaagttcgtgaacgtgcagctcgtaaaggtcgcaacccacaaactggtaaagaaatcaaaatcgcagcttctaaagttccagcattcaaagctggtaaagctcttaaagaagcagttaaataattgcattttgaaaagccatcctagatttctaggatggtttttttgttggacagctctataggataagggtataataggaaaaaagaaggagagagaaaagaccatgcgattcattttaggcctctttgccttgttgtttatccgacctattttgtatctattgaaagggctgtggttcgtactggaattttgctttatgatcctcgtggtcaaaatgatcctaggaaccgtgcgctggatgaccagttggatcggttgagagtagatgaatctatttcaggctcgtgaatcaatgtcccccggacataaactcgcttttcggttttcaggctcgtgaaaaaaatgtccactggacatttttttaattaaaagcattctaaatagtgatttattttgaaacatgatataataagggtaacgaatcgattaaatcatattggaaaggggggatcatagtgaacgcattgcatcgtcatgaagaagagcgcgtggaagaagtcttgcaaaatttgcgtgctaagggcattcggattaccgatacccgtagagcagttctttcctatttagtggcgagtcatgaacatccaagcgctgagaagatctatcgtgatttattgcctcagtttccaagcatgagtctagcaactgtctacaacaatatcaaggttttaattgatgagggggttgtttctgagatcaaggttcgcaatgataccacgacctattttgatttcatggggcatgaccatttgaatgtggtatgtgaaaaatgtggtcgtatcgcagatgtggatatcgaagtcccagatcttcatgaagaagcagccagtcaaagtggctaccagatcaccaagacccagatgaccgtctatggcatttgccccgactgtcagaaaaattaatgtgagagaaaccagagccctagggctcttttttatatgttgtaacgacactagaatagcaaaagaaaaataggaaaaatcatgatataatatacttttggaatcaaataataggagaacgagatgaaaaagctggaaaacttttcttggaaaatgtggcacgtttataccttgattgctgtggctgtattttttattggtagcctttgttcattcttttacgtaaaagatgcagactatattgttcatgagcgaaattatatttatgttggaaaagggcaacggttgacgaactatgaaaaagtaaagggactagatacaggattcccaattttagctctttcattaaaaaatacagatgaagatggttatgatgatcaaattgctgtcggacataactatatagcctttcaagattctaagctgggtaatgttaatcaaaatgaaaaagattcggaagaatattttaaaattcgttattatctgattggagaagaaaaaggagaggggcataccattgatgtctttaaaattattcagaaactgggttataaaacgatttatggaaacatggagtcaaccatgtactctgatgggaaggacgagtatgtcagggtgaaagtgacagataaggaatccatctattttaatcttaggacgcaaaaggagagtaaaaaacgtccgaagaaaacgatacaatatggttataaaggcatctatagggccctgtctaatccagatttcattacgaagaacttcgatgaagaggaaagcaacacgaaaatttcttggccatgggttcactataaacagccaaagaagaaaatgactaccacaaacgatagtagttattcaacttcagacagtagtgaagaaaaacctgaagatagcaaacttctttcaatattaaaaaaatatggatttctccttgttttagaagaagacagaaatttatctagtagccagtcattagtgtcgaagctatttccggatgcaactcactttgtttggtttattgatgatgactatacaagggatggtcataacgaatatatccacaatattgaggaattaatccaagtagttgatgaagagaaagttgagaaagtatatggaaatgaagaatgaaaaactaaaaagctgtctcgttctagttggctttttggctcttatcagtatttgtttttatagaaatttggaaacaaacatcaaaggactctataaaagcaattattatccaggtgagataaagatcaccagtctttccctatctactcaagataaattgggaatagatgtcaattatgtttattctgagaaggtcaatggaaaagtcatttctattccattaaagagacgaatgaaggttgaacaatttgttattccatattatccttatttgggtgaagaaggtcgttatggaatgactggggattcgattggaatgtatgctgaggagtatagtgtatatggtccaattcttgaaaaagcactcgagctcaatcctgacagtaagaaattggaacaggaaattcaaaataaaatcaatcaaaactctacgttaaaaggctctaaaatcactttgaaatttacaactttcagtcaattatcaaattattatagagttagatggctcggtgaatatgagaaagaatcaatgaagaagaatcgtaccgtacttggaggctggtatcaatttccagtagaggatgcattagaatataatgccttatatgttcaaatttcgctaccaaaaggtgtcgataaagaaagtatacatctgaaggatgagttgaatacacttttacaaaaaacgagcttaccaaatgggatttatgctcttgatacctcaactgaactacccacagctcgagctatgatttttaatggaaaggttaaagaaagggattaaacatgtcagaaatacaaaaggatactggacttagtctagcttgggaacttggattgtatattttcctaattttttcatttctagctttgccattttacaatgatctagctatttcaaatccaaataattcacaaatttttctctttctggacaataaccctgtatttgggggtgaagcgtttgaggatcttgtaaatttttattttatcattttacttttactattagtaaccttacctatccttgcttttttcattcataatttctttgaaaaaaagggatacccatttttagctagtttacagtctttgttgattcatgtatcttgtgtagtaatgttcgtttatgcggtgttttctttgtcagttcagaaagatcactatagctttagctcaggtttctatgtctgcttactcatttatttgtttcatatttatagcaacttacgtgatataaaaaagatgattgaatatcgaaattctgctaccaaaacagctaatgaggcagaaatcttatcaaaagaatagttctatattgtgaatgtttgttgaagacaaaaagaagcaagctattttcaaaccagagccgtcaagctcttttttgtatggtaaagccacattaggataccgagagaaaaatagggaaaatcatgatataatatactttcacgatcaaacaaaaggagaacgagatgaagaagctagagaatttttcttggaaaatatggcatattttttccttagttgccgtgaccgttataatggttggcggtatctggagctttttttacctaaaagaagcggtacatgttgtgagtgatagagattatgattatgttggtagaggacaacggttattggaaaatcgaatcattagtgaagaggccaccggaattccaatattggcttatagttttaagaaagaagatagaaaaaacaacccatatatttatgctgtcggatcccaatatatagcccttcaagattctaaactaatcagtaatgaagataagaaaaaagatgtaaatgaatattttagaattcggtattatgaattgggccaagagaaaggagaaggtcataccattgatgttttaaaactcgttcaaaaaatgggttacgactcgattgaaggaaacatgcgaagtagcatgtttacagatggaaaagatgagtatgtagctttcaatgttacaaaaaataatctcctatttgtgaatctgaacaagggagaaatcgcagagacagatccaaaaatgattgttgattatggttacagtggattttatcaaatattgcctgcacccaaatttgagacaaaaaaatacagtcttgatagaaataaaatagatgtaggaggatgttggatagattatgaatatgatgatgaagatgaaaaagtagaaacttcctcaagttctacggagagattagatcgcaatggtgtgaaggtgaaggatagtaaactcttaaccctactaaaaaaatatcgccatctcttgattttaaaacaaaacctcactatggaggaggaaaaaactgtcatcaagagtttgtttcctgatgcagatcatttcagttggtctattagtgctccttatacaaagagtgggcagaaagaaatcgttcggaatgctgaagaatttaaaaaggtcataaaggaggaaaatgttgaagaagagttggaacgtgattttgaaaaaacatttcaagaagggccagacgacgattagtgatcggtcaaaagcctttctagtggttatctgcttcctactgtttctaggattctatttttatagaaatttagacgctaacctaaaaggtttctatgatagtagaagtttccggggagatatacagattacaggtttctcttggactcgtcccaatgccggtccggatgtgaattttatctattctgaaacggttgaagggaaaaagatttcaattcccctaaaaaaatcagtcagatttaaacacttggtgatgccgtattctaataagattgatttagctgaaaacctaggaatagaaaatacctatgatgattttgatagagcctatttgcctattatagagaagggatttgaattcagtactgagcgaatcgagcttgaagcagaattagataaaaaaattaacgagtatagtgcttttagcggctcttggattgaaataagcttatccccttttaagaaacgaggtaacaattatttcagtttgatggagcaatatgagaatggcattcctaattctgagttaaaaattctagggggatggtatgatgtctcgtatagtagttttatcgaatcaggagacatttatgttaaaattatctcccctgaaaatataagtcgatttaaagaatcagggaatgattttaaatcagttttgaagcattacttggcaattaggtctctaccagatgggtggtatggcctattcgatgatgggaaacaagtatctgagactgttgaaattcggaatggaaaggttagggggtgaaaggagacatggtaaaaggaaaaataaaatttaatcatcagttatggcgtcaacttggcttatttacggcctatgttttgaccctattgatgtcaccgttttatatatatcaaaaaataggggagaatgattcggcacggtttacgattttcctaggtgaacattctctctacaatgccaaagagttcgaaggtcttcttaattcctatttcaccatttcactagtgattcttttcgtattaccagtacttgctatttttttaaaatatcttctagataaaacaggctatcctttgctggcgcatcttcaatcactgttaatttttgtagcctgtagcattattttaatcttcaccatgttttctatgactgttcaaatagacctccttcggttggaatggggattttacttgtgtcaggccttctattggatttttatcctcagagagtggtggaatatcagcgggattgtttatagacgaaatcatccttcagatgatgaaagagcagaagagaaggagcaatcggcagaataaacctatttcaacgtaagaataaacattcctcaatttcaaactagagccgtcaggctcttttttgtgagaaattgcacttttctatggtcgccactagattttttactgaaaatctagtagaataaaatagataaacgggggaaacctcggagaataaaaaggagatccatctaatggtaaaattggtttttgctcgccacggtgagtctgaatggaacaaagctaaccttttcactggttgggctgatgttgatttgtctgaaaaaggtacacaacaagcgatcgacgctggtaaattgatcaaagaagctggtatcgaatttgaccaagcttacacttcagtattgaaacgtgcgatcaaaactactaacttggctcttgaagcttctgaccaattgtgggttccagttgaaaaatcatggcgcttgaacgaacgtcactacggtggtttgactggtaaaaacaaagcagaagctgctgaacaatttggtgatgaacaagttcacatctggcgtcgttcttacgatgtattgcctcctgcaatggaccgtgatgatgaacactcagcacacactgaccgtcgttatgcttcacttgacgattcagtgattccagatgctgaaaacttgaaagttactttggaacgtgcccttccattctgggaagataaaatcgctccagctcttaaagacggtaaaaacgtattcgtaggagcacacggtaactcaatccgtgctcttgttaaacacatcaaacacttgtcagacgacgaaatcatggatgtggaaatccctaacttcccaccattggtattcgaatttgacgaaaaattgaacgttgtaaaagaatactatcttggtaaataaaaatatccagtggatatttttatcccaagcctagaaatgctaaagcgaggcaattctagcgggatttgttatccatacaaaaagctgacttcggtcagcttttttgtctttatgaaattttgtaattattttaggaattaaatgaatcctatgttgcaattagatattcaaaagtttaaggaagtctgtttcagtcaataattcaatattttggcctttttctaaaagttgattagcttttttcatttttgagctaagaccagtctcgcctacaacatgaaaatcttgttctccaacaactagaaattttgtattttttgacaagttattttcaggtattcctccaacttgaataacttgagctgctgcttctttacgtgtcatactttctaattttcctgtaaatacaaaatgtgcattataaaaaggatggttttggtttaattttgcaatttcatcttcggaaagtttgactagttcagataatttattagatttagaatcttgggataaggaatgaatcaatgaaaatcggttgagaacattgaatccaattgaatcgaggaattcgtataggttttgatgattacaattttctattaatttatttacaatttgtcctgcagcttttgcatccgatagagcattgtggtgctctaattcaatgttaaagtattgagttaatgtatttaatttataatttaattggttaggtaaagcttttttagataatttataactgcaaaaatatgaaaagtcatttatcgggacttcatattttttttctgcatcgcttaatgctttgatatcaaattgagcaaaatgtgcaacaacagggagatcgtctataaatttaataatttctttgtaaatctcaggaaacgtaggactatctgatacgtctattgattttattccgtgaatttttgtgttaaaaaaattaaattcctcttctggattcagtaaactataatattcgtcaattattttaccatctataaattttactaggccgatggaacatatacttcttggatttgaatttgctgtttcaacatctaaagaaacaaaaccatttcttttgcttgaagagatagttggagtagtagttacgttattttcatttttatcatgatctctatttctaaacattatagaaccctcatagttagtaatattgttatgactattataattccattgaaacaaaaagtccatatagtaaattacttgatgaatgaataaattttgtaacctttgtcttgggttttcagggtctcctaaaaatgttataatagagtgttactaaattgggttccattagccctgaaaggaaaagaaaatgacaaaatcattctacatcacaacccctatctattacccatctggtaaattgcatattggttcagcttatacaacgatcgcctgtgacgtcttggcgcgttacaaacgcatgatgaactatgatgttttctacctgactggtcttgatgagcacggtcaaaagatccagcaaaaagcagaagaagctgggattaccccgcaagcttatgtagatgggatggccgttggagtgaaagaactctggcaattactcgatatctcatacgataaattcatccgtacgacagacgattaccatgaaaaagtggtggctcaggtctttgaacgcttgcttgcgcaagacgacatctacctgggtgagtactctggctggtattcagtctctgatgaagagttctttacagaaagccaattggctgaagtattccgtgatgagaatggcaaggtcatcggtggggtagccccatcaggccacgaagtagaatgggtctccgaagaatcttacttccttcgcctcagcaaataccaagaccgtttggttgaatttttcaaatcccaacctgatttcatcacgccagacggccgtctcaatgaaatgttgaaaaacttcatcgagccaggtttggaagatttggcggtatctcggacaacctttacttggggagttccagttccatctaatccaaaacacgtggtctatgtatggattgatgcccttctcaactacgtgacagctcttggttatggtcaagaagatcatgaaaactttgataagttctggaacggaaccgtcttccacatggtcggaaaagacatccttcgtttccactccatctactggccaatccttcttatgatgttggatatcaaattaccagaacgcttgattgcccatggttggtttgtcatgaaagacggcaagatgtctaagtctaaagggaatgtcatctacccagaaatgttggtggaacgattcggcttggatccacttcgttactacctcatgcgtagtttgccagttggttctgatgggactttcacaccagaagactacgtggctcgcatcaactatgaattggctaatgaccttggaaacctcctcaaccggacggtagccatgatcaataaatactttggtggccaagttccagcttatgtcgaaaatgtcactgcatttgatgctgatttggctaaggtggttgaagaaaacatcgctgaataccacaagcaaatgaatgcagttgattacccacgcgctttggaagccgtatggaacatcatctctcggaccaacaaatacattgatgagacagctccttgggtcctagctaaagaagatggcgacaaggaacaattggcagcggttatggctcacttggcagctagccttcgtgttgtggctcacttgatccaaccattcatgatgaatacctcaaatgccattatggaacaacttggcttgggcttggacttcgatcttgaaaacttgaccctagcaggcttccctgaaaatgtcacagtggttgccaaaggaactccaatcttcccacgtctcgacatggaagaagaaattgcctacatccaatctcaaatgactgctggaaaaccacaagaaaaagaatggattccagaagaagtggaactcaagtctgaaaaagatgagatcaaatttgaagactttgacaaggttgaaatccgtgtagcagaagtcaaagaagtggaacgcgtcgaaggatcagacaaattgcttcgcttccgcctagatgcaggagatggcgaagaccgtcaaatcctctctggtatcgcgaaattctatccaaatgaacaagaattggtcggcaaaaaactccaaatcgtggctaaccttaaaccacgtaagatgatgaagaaatatgtcagccaaggcatgattctttccgcagaacacggagatcaattaacagtcttaactgttgatccgtctgtaccaaatggcagcatcattggttaaacatatataaaaaagctctcccgcgggagtgcttttcttgtgtcgatatagttcctatcattgaattttacaaggatggtagatgagtcctattagtaatgggtgttaacggagacttccgcagtgagaaaagagtctgaaacattttcgtttcagacactcggaagatttgagacagtgggctcaaatcttaggtatggaatcccaaagggattcgctatcgtccgtcctcacctaaggaaagtctccgaatatagtccctattcatccggccggtattctaggatatctcctggctggcagtcgagttctttgcagatggcttcaagggtggtgaagcggatggctttggccttgccggttttgaggatggagaggttagcagtcgtgatgccgattttgtcggctagctcgttggatttcattttccgcttggccagcatgacatctagattgacgataatcatggcaccctccttaaatggttagctcattttcttcagcaatctcaatacctctctctaaaatcttgccagagacccagacgattggaacggcaaggagaagccctgtgttaaaggtcaattggaaagtgaagggaaggagataagcatttccactggtttcaagtgtgccagacataaaggacaagaccaagagaatcttccaagctcggttgcaaagatcaatgttggagtgagaaaaaatcttttcttggtagagattttggaggaagttgcgaatggtgatgagaaggtaaatatagatagcgcttgaggctagtgggaagagcagctgccagagaggttgtggatgtttggggaagagctggatgccattcgcatcaaaggacaagcgacctgattgaatgagatctttgaaaaggcccatgcgggaaagcagatggacgaccaatgcagccacggtcataaagccacagaagtaaatgaaagccgttaagacttcaatgacattttttaaggtttttgagtttttcatcgcaagcctccttgaagtttatttatttttcacttatagtatactccttataaaaaattagtcaataaaaaagtatcgaaaaacgataaaaaaataacgataaacaaaatattgtttttgagaaacaggtatttcctactaaaactagtcagttcaaacctggaaaactactacatagaggggaattttactataccttcgatttagggtatactagtgtaaagatcttattccatggaggtagtaaaatgaatcttaagtggaagaaaaaatacctggggccgattttggggctggtcggagcagctgttctgatcggaggagtctatctctactctagctccaatatccaaccagaccatcaaaaggaatttaaccagaccagtaagaaggccactaagccaaaggaaaaagctattgacttgagtggtgactacgtctctaatgaacgggatgaagccaaaatcgagaaaaaaggcaaggcttggaagatcgattaccaaacgtctgatggcaaggtatctgctgaatttagcacgaattggaaggtcgaaggatctaacaaaatttcaacaggcaagatgaaaaaatccgatggcaatacagactttacagtcactgttcgtgtcttcaaatacaagacagataagaagcctttgatcacggtcaccatgtctgataaaaatcccgaccacgagatggtctttgccaatcgagaggattttttcaaatcgacagatcccaatgatgtcgtccttgatggcaatctctcaccgtttgaaggtgcttattccaatgatgcctatgaaaaggaaatcgccgattctggttttaaactttatggctatactccagaagaatattaccaaaacaagaccaatgccttcccaagtattgtaaatggggagaccggatggactttctggagtggaggcactcgggcaagttacttgttcaataaagaaaaagagcccaagaagcgaaaaggctattatgaagtttatttcactggggcaaatgggactgcgatccaagggcaagagcaaaccttgtacttaatcccagcgggtgtgacaggtcctgatggagtagcttcccaagaacgtcggattctctttggggatgcggcctaccgggattatcatctagagtggtggaaagcatacccacaaccgaaaaaagagaaagacttggatattgcggccattaacggaggcgacttctctagcttagctggaacctggcgcaatggcaagggtgctgaaatcgtcatccaagcagacggaaaagtcaagggccaaggtagcctcaaggctgttgcggactcggataagaagagcaagatcccttatgttgagatgaagatgggtgagactggtgctgcgattggacttctgaaaatcggtttccaaaatccggatggagaccagtctgataccagcaagccacgtctagtggtcactcaatctgcaggcaactatccggctgatcaatatttttaccgtcaataaaaagtttgagacatgtttgtctcaagctttttttactgcaaggaaggcttgtggaatctaggcaactgttagtctctaacattaaaagggaaaaaatgtaaaaaaagcttgacaaagcaaatgattcgcagtatgattaactagttaattaactgattaataaactagttaacaaaaatgaaaaagaggtgaagaatgattaggagaaaaatgaaggttctgggactcatgttcctcagtttctttctgctgacagcttgtgctagtcaaggaaatgcaaagcccccttctacaaaaggtcttaaaattgtcacgagtttttatcccatctatgccctggtcaaggaaatctctggcgatcaaaatgatatctggatggttcagtcaggtgcagggatccatgattatgaaccctcaaccaaggaagtggcccagatctatgatgcggatgtatttgtctatcattctcagaccctggaatcttgggccggtcgcttagatcccaatcttcaaggttccaagttgcgagtgatcgaaggcagccaaggaatgacccttgataaggtggctggattagaggatgtcgatgctggtcagggaaaagaatccaagcacttgtatgatccgcatacttggttggatcctgtaaaaattgcagaggaaggaaaggttatcgcccagcgtttgggagagatcgatccaaagaacaaggagctctatcaggccaatgctcaaaagcttgaaaagcgctgtgaggacctagtagcccactaccagcctctctttgacaaggccaagcaaaagacttttgtgacccagcatacggccttttcttatctggccaaacgctttggtctcaagcagttagggattgcagggatatccccagagcaagaaccgaccgctcggcaattggccgagatccagcagtttgtcaaagactacaaggtgaaaacgatctttgtggaaaagcacacgtcgtcaaaggtggcagatagtatcgccaaggcaacaggggcgcgtgttaaggttctggatccactggaagctgatccacaaaatgataaggatctattagaaaatttagaagaaaatatggcgactttagccaaggaattagaggagtaaatcaagaatgaagaaaaagggaacgattggaattgtagcgactttggggctaggactctgtgcctatgcgctcagtcagcaaccacaagtcaaggaagagaaaaagaatcagattcagtatttgcaagcggacaagaaatcgtcatcgtctgcctccagtaaaaaggaagacagcatcgaagcggtcaatgccaaggaaaagacccaggcagagcagattgtcatcaagattacagatgaaggctttgtcacttctcatggggatcattttcattactacagcggcaaggtcccatttgatgccatctttagtgaagagttgattttgcgggatccaacttatcagctgcaagaagcagatatcgtgagcaaggtcaaggatggctatatcatcaaacgcgctgggaaatactatctctacttaaaggatgcccaacatacagttaatgtgcgctcgatcgaagagatcgcccaacaacaaaagggaggcaccaaagaagaaggagagacgggatcggtgcaagctagctcctcgcacaaggcaggcaagacccgtgacttccgtcaaccgagtcaagcgctgaaagaaggtaagactcttgagatgttgacggctaagaaccatacaggtggtggctaccgtacggacgatggttatgtctttagccctggagatgttatttcagatacaggggacggctttattgtgccccatggaggccatttccattatattccaaagagtgccttatctgctggagagttagcagcagccctctccgtcttaggtggtcaagccggccatcaggctgggaactcacgcctagctggagcaagcacagagcaaggtactccagatcaagtctctccaagccttgggaagcaagcgagcaaccagccgtcatccagtccaaccaatacacagacaaccccaacgacgtctaaaccagctacctctaaaccgagtccaaccctgaccaacttgatcgaagaattgcagaaaacacctctgtcttctcgtcatgtggagtctgatggttctgtctttgatccaagtaagattaccaagtggaccgatcaaggaattgtctaccctcacggggatcatttccactttatcccttacagctccctatctcctttagaacgtgagctggcacggcaattccaactgcttcgggcccaaggtgctactacacctgctgaaataagaccaaacaagccttcaagtccaagtacaaaaccaattgaccatgagcacgagcatgaacatggagatagtcacgagcatgaacatggggacagtcatgatcacgagcacgaagaggagcacgatcatggtttccatgcagacatggtcatcagtaaggacgaggacggttacatggtcgctcatggcaaccatgcccattatttctataaaaaggacctctctcctcaagagattgcagcagcagaggcaactctggcaggtaagaaagaagagtccaagggacagccactgacagatgatgtcgccagctattctcgcgatgcctcagatgaggaaaagatccagtatatcagtaagacctacggcgtccctcgtgaggccattaagatttcaaatggtttctttgtctttaacaatccagaccaagaatacgatccgacccacatccacccttatgccgttcggaaggaacacgttcggattccacttgagacgggtaatcctgaactagactttatcaatgaactctatgcaacagcccttcgctcagggatttctccttacagccttcagattgaaaatggtcagtttgtcatcccacatggcgatcacaaccactacatcaaggtgcgctcagcgggactagcagactacttagcccatcgccttcctaccatccaatcgccatacaaaaaaggagacttggataaaaaagcagtagaggaaaaggtcaaccagctcttagcagaaagccggactctctatgcttctgatccattgcaacaaagacggattgagctcatcttgggccacttcttggaaaatgtcaagagtttcccaagtaactcaacagagggctatctggccagtctcaaacaggttgatgcgcagtacattcatgcgactcaagcggtcaagccaaaagaagagacagccttggaccgtcgttaccaagaattgctggaacaagtgcgcttgctagacacagaagccttccaattgaagaaggaagagttggtctctcaactgcaggaagcctatgctgccaaggacagtaagcgtctagagcaggaagggaagctattagaagctgttcaggagatgcaagatcggacgggtgtgacatcggtcgactacctcaagtatttctaccaaagcttgagcgatgcgcgcttgacaccagaactccgcactaaggcagcagatctagccttgaagctctaccgagctcaagcctttgaagaagcttgggattccaagtctcactttatggagctctaccaaactaagcaagctattgaccagcttttctcccaagataaaggccaaacctatcctattgaaaaaacagttttggatcaaaaaggaagtcaaactccatcctacaacgtagcggtttatgatttcctcaaaggcttgtatggagagttggataaggcaacagaagcccgtcaacagaacaagattttgacagccctcttagagcaaatccagtcgctcttgccacaagtcgaagaccaaggtaaacgaacggcttttgaaacaggcttggctcaacttggaaaagaatctgatccagacaaggctatttcaagtggggaagcacttctacgcgaaatcagtgataccattgaaaagcaaaaacaaaagaaaaccgaagaacctcaaattggggatgtcgcgctttatcaacagctctataaccaattgatggccttgcaccaacaattgcaggacaagggagctagtgatgctgtatttgatcgcttagaagctctctttgaccaattgtctaatccaaagagtgataaagcagccttactacaggccatccaagccttccaggcagaattagctgcagccccatctgcaagcgaagcgggcaaaccagcttccacagctgaaacgcctgtcgctacagagactccagcagcaacagaagcagcagcttcagaagggaacaagcctgccacaactgagacagaaacagagcctgcaagcgcagctgtaacagaagcaagcacgccagatgctccatctcctcagaaccaatagaaaatagaaaagagagtgggacagaaatcggtaattcgttagaattcgatttcgtcctcccacctccgcacagttgagtagggctataaaagctgatgaaatcagcgtagtagagcccactcaaccactgcgtattgctcgacaatccaaagataattaagaggctaggacttttgtcccagcctcattttgcgttctagtgaatagaagaggtcagtagttgagcttcactccttgtgctcaagaagcagtggtgaggaagtctcgactgctttttttcgcttgaaaaatgcagccatttgaaccaggatgcgggggaccgtctgccattttttccaggcttgaaagcgggtgtcgatgagctgcttggccaagcgttccagcatttcccgctcggttggatccaaatcctgggcattttggaggatttccttggccttagctagctgtttgagatcagttagatcattgatggaagtgatgccggcatccagaaaaatgccaaaaaaggtgtcaaaaaacttcttgcgctcgtctgccgaggtctcgcgaacccattgcttcaaggtcagatcggtctgctggctatctggactggtttcagaaacggtcacaaagctgtagtccttgatttcccaagtaaaggcgtcgtgctgggcaaagctacccaaggcgctactcttgacaatggtcgtcggttctggcacttccaacatcatgccaacgatggatccctgagggacaaagcgacgaatgtttggggacgtgcgctggtagccttcggtttcgataatggccttgttgaggccaggagcatcgtagctgtagatcgcgtcgacccgctcaaataaggaatcaggtagatacgagcaggcataggtcgcaaggttgccccctttggagtgaccggctactaagaaacgtccttttggaaattccttcatgacatgttgcaggtagctggctgcgcgcttctgagctggaacatggtccatataggtcatgtggaagtcttccttccagccgatcaaggtgtcatccgtccctctgaaaacgaccaaatacgtatccagactaagccgataggtcatggccgcgaactgtttttgcacatcgggatcgtattcatcgacatagttgaggagtttgatgttcttaaagcgctttgaagtagccaactcatcgactaattgcagatgctggttactcacgataaaatcggtagtccgatcgatcagttccatcgcatcagacaggcgcactagaattcctgttgtatctccttgaggcacaatgtgtccaaaggggagataggtcagctctgtcaatgcgaggacatccagctccttgaaggggcggtcatatatggaatcgtaagtcacttcttttaggtaatcaaaaatagtcgacatctgtgcctcccgtgtcttatttctttcagtatagcacaaaaatggatggagaaaaagcgcctcctatcaagaaagtagagaccagctcttctttccctctgaaacagcctttttctctgctgtttaatctgttataataggaagaagaaaaaaagaaggaaagaaagccatgcataaaattctcttagtggaagacgatgaaattatccgccaacaggtcaaacaattattggaacaatggggctatgaagtggtcgcagtcgaggattttatggatgtcctcgggatctttgtcgaaagtgacccccacttgatcctcatggatattggcctgcctctctacaatggttaccactggtgccaggagattcgtaaggtttcaaaggttccgatcatgtttctttcttcacgggatcaagccatggatattgtcatggccatcaatatgggtggagatgactttgtcaccaagccctttgaccaaaatgtcctccttgccaaggtccaaggactcttgcgtcgctcttacgaatttgggacagatcaaaatctgctagagcaccggggagccatcctcaatctcaagtccacggacttggtgtatgaaggggaagtcatcaagctgaccaagaatgaatttcagatcctgcgcgtcctgtttgagcatgcaggcagtatcgtggcgcgcgatgacatgatgaaggagctctggaatagcgacttctttattgatgacaataccttgtctgtcaatgtggcccgccttcgcaagaaactagaggaggctggcttgtcaaacttcatcgaaaccaagaaaggcatcggttacgggttgacccatgaataaatttggaacgatcttctggcaatatgtggtatcccgcaggcgcctactctatctatcggtcatctttttgatcgtcgatttggtctttgcctatctctttccagagacagggacggttttcctctatgcgaccctagtgctaggcttttttgccttctgtgtcttgatctgggatttcgccatgacctttcgggactaccgcaaagccgcactttatgaggaaatagaggttgcctcaccactggaacacctcctttatgaaaaatacacggaagaacagcaggcgcgcttggaggaagggaagacagcccaggccaagttcaatgatctgatggattactataccctctgggttcaccagattaagacgcccattgcggccagccagctcttggtgcaagatgtcgagacgcccattgtcaagcagcagatggaacaggaactctttaagattgactcctatgccaatttggttttgcagtacctgcgactggagagttttcatgatgatctggtcttgaggcgcgtgtcggtagaagatttggtcaaagaagtagtccgcaagtatgccctcttttttatccaaaagaacttgaccgtggatctgcatgatttggagcaggaggtcatcaccgatcgcaagtggctcctggtcattatcgagcagctcttgtccaatagcctcaagtacaccagcaccggtgggattgaaatctattttaaagaccagactctctatataaaagatagcgggattgggatcaaaaatagcgatgtcctccgcgtctttgagcggggcttctccggctataatggccacctgacccagcaatcctcagggctggggctctatctatctaagaaaatcgcagagcaattgggtcacaggatcaccctacactcagaggtcggccaaggcacgaccgttgctattcgctttgaagaaaagaagttggtcatggattaagatttcccatcttacaaaaatgtaagaaataaacggcaaaatgaaaggttaggttatggtagccgccttttattttttatacaatagtctcatcaaatgaaggaggtcaagaaaatgaaactcttgaaatggatgaaacaactcaaaaagactgagaaaccttgtaaccaaaccgatctggaaaagacggaatttggtctccaagtcctgcaacaaacccaagaatttttcttgatctactagtaaaaggagaaaagcatgtcattactagacgttcaacatatcaaaaagatctacaaaacccgttttcaaggaacgcaggttgaagccttaaaggatattcacttcaccgtggaaaagggtgagtacgtggctatcatgggggaatcaggatctgggaaatcgacccttctcaatatcctggccatgctggatcagccgaccgaagggcgggtctacctcaacggtaccgatacttcaactatcaagaacaaggatgcctcgagcttccgtcgggaaaaactaggatttgtctttcaagacttcaacctgctggacaccttgtccgtcaaggacaatatccttctccctctcgtcctctctcgcagacccgtcaaggaaatgatgactaagatcgatagcgtgagtcgggagttgggcattcaccagcttcttgagaaatacccttacgaaatctctggtgggcaaaaacaacgggtggctgtagcacgggccatcatcacctcacctgaaattctccttgctgatgagccaacaggggcgctggattccaaatcttcggctgctttgctagatgtctttgaagatatcaatagcatgggacaaaccatcctcatggtgacccactcaactgcagcagcagcgagggctaagcgcgtgctctttatcaaggacgggatcctctacaaccagatcttccgcggggaaaagacagagcgtcagatgttccaagaaatctcggataccttgacggtcatggcaagtgaggtggagtagatgttacgattaaccactaaattagcttgctccaatctgatcaagaaccgcaagctctattatccctttgcgattgcggtcattctcgcagtgaccatcgcctacctctttgactccctaacctttaatccccgtatttccgagcttcgagggggctcttccatagtgttcactctcagcttggggttcttcgtggtcaatgccgcaggagctatcatcgtgctctatgccaatagcttcgtcatgaaaaatcgctccaaggagctggggatctacagcatgctaggccttgaaaaacgccatctcatcagcatgatcttcaaggaactcttgctttttggctttctaaccatctcagccggagtcttgattggagctctctttgacaagctgatctttgcctttctcttgaaactcatgaagatgaaggtccagctagtatccaccttccaacctgggattgtcgtcttggtctttgtcacctttggtctcatctttgggcttttgattcttctcaatgcttggcggattctccgtttgaatgccctgcagttgacgcgtgagaaggctagtggcgaaaagaaagcccgcttcttgtggccccaaaccatcctgggactagcctctcttggttttggctactacctagctttgtctgtcaaagaccccatcattgcgcttgtgaccttctttctagcggttatcttggtcatgatcgggacctatctgctctttaatgctgggatcaccgtcttcttgcatctgcttaagaaaaagaagagctactattaccagcccaacaatatgatctcggtctctaacctcatctatcgtatgaagaaaaatgcagtgggccttgcgaccattgccatcctctcgaccatggtgctggtgaccatctctgcagccaccaacatctatgtcggtagcgaaatggtcaagaaaatcatggctcctcatgatttctctgtccaaggaaaaggggtcgatctggagcagatcaatcagaaatttgatgaatttgcctctgagcaccatctcaagatcaaaaatcgtgacctgatgacctatgccaactttggggttaaatcacaaaagggcacagacttcaccgtctatccagctgatgaacgcagcgtcactcctaaaactgtctttatggtatttgatgcagctagttatgaacacatgacaggcgaacaagtcaatctgacaggcaaccaagtcatcctctttgctcataacgaggctctcaaaggccaaaagcagttcaccatcaatggacaggacttccaagtcaaggaagaagtgagcaaggattttatcaccgaccacgtgcccaatcagtttaatatgctgacggaggatttcaactacctgatcgtacctgatctctcagcctttgtcgctcagtttccaaatctggccatcaataccaatatctacggtggtttcaatgtcaatgtcgatgaagaccagcagctcaagttagcagctagttatgacaagatgatcgatgaattgagtagccaacagggccaaggaacatttatctatggaggtaaccgagccaatgatgtggcagagttgaatagcctttttggtggcatcttctttatcgggattttcttgtcactgatcttcatggtcggaacggtcatcgtcatctactacaagcaaatctcagaaggctatgaagaccgtgagcgcttcgtcatcctccaacaggtggggctcgatgaacacgaggtcaaacgaaccatcaaccgtcaagtacggaccgtcttcttcctccctctcatctttgcctttatccacctggcctttgcctaccatatgatccgcctcattcttaaagtgctcggtgtcatcaatagtggccaagtcctcgtcgtgaccatcagcgtctgcgccgtctttcttatcacctacctgatcgtcttttggatcacctctcggagctatcgtaagattgtgcagatataaggaaaaagaagctcgaatcaaattagaaactttccttaggtgagtacggacgtcagcgaacttcgaagaagttccatgactaattattgagcctaaggtctcaataattccgagtgcctgaaacatgattatttcaggcacttttctcacagcggaaagtttcaatatactctaaataataatgagaaatcatttggatatttttgcacaatagtccagattaggttattcaaagtaaaaattgtcaactttttaagctcgctcatggcgggcttttgtgcgaaaatcgacagcgattgtttttgcttttcaaagggatataaaaaagactgaaccagtcgagttcagtctttgttcgctttctattaaagtgatgtaaggaaagtcaatcctcctaggatgacacctgccgaattcggaatgatcaaaatccagtcttttttaggttcctttgtccaaccataaatgacccagatcaagcaagaaatagcagctgacaagggttggaaaggttgggccttgtttccctgtaaattagcaataatttgtgggatgtaggcaatgaaaacgataatcccaataaaggcaccgatcgagccaacgatttggttgattttttgtttattcataaaattttacctctgtatatcaaaatagcataagtaggaagaaaatgcaattaatttgcatgctatgcaagatgaaaatgattacattcgcacaaaattagacaatgtgtcaaaaaaatggcaactagagagaagactctctcgaaaagaaatccatcttcctgcaaaatcacaagattgtgacactttacagttcggtaacatttgaaaaaaagacttgaatttgtaaaggacaaaaggtagaatagtgcatactttaaaaaaagaaaaggaaatggtagtttcaaaatgaatgaaaaacaaatgaaaattcttggttgggttgcgacctttatgtctgttatgatgtatgtgtcttacttcccacaaatcatggataacctcgcaggtcacaaagggaactttgttcaaccccttgtcgcagccatcaactgtagcctttgggtttactacggactcttcaaaaaagaacgcgatattccacttgctgcagccaatgcaccagggatcatctttggtttgatcacagccatcacagccttgtaatcaatgaaagagagagtaggacagaaatcggtaattcgttagaattcgatttcgtcgtcccacctctgcacagttgagtagggctataaaagctgatgaaatcagcgtagtagagcccgctcaaccactgcgtcttgctctacaattcaaaaacaattaagaggccaggacttttgtcccagcctttttttgatggaatgaatcatttccatggtataatgggaggactattcatagagaagatcaaaaggagacaaaagtggagcaaaaacatcactgtcaagtcctatgggcgaaaaataaatacctggtgctcagtcgttcgagtaatatctacaaggaaatccgggaatacctcaagcgagaccaggtggaggtcagccacgtcgaggacctgatccagcaagcgctggccttgccagaaaatcgtggccaggtatccaacgccttccagcatatctggggctatttcaaaaagcaggcgactgcagaggaaaaggcggactttatgttgctacttgagaagtaccagcatggccaagcccagcaagaagatctcatcaagggaatccagactctccttgagcgttacccgaatcgctacttacaaggctcgacgctactaggaggtcaatagatgaggctctggcaccaagacttgattcccaaactccctcgtccccagctcctgggtcaacaccgggaatgctgcgctcttcgaggtaatggctggggcaagaagcacgcgacggtcaactatgtctttgaatactcgccctatcgtctctatgcctatcaccgcttgatcatggaggagatgactgctcgtggctataaggtcagcccagagtggtgggagccgacctaccgaggcaagacctgcccagcctatccagagctggaagaggaagtcttgagtactcctatttatccagaacatcatgcgggttacctgaaagaatgcctggagaatctagcagaaaaagggattcatttagattaatcattgattaagtaaaaatgtaagctaaaccattcgtaatcaattattacgaatggtttttagtatctaaaatatgataaaataaaaaggataatacattaattaaggaaagtaaaaatggcaagtaaagaaaatgcagagcgcaaggaacttcaccgtaaaatttgggcgattgcggacgatgttcgtggggctgttgacggttgggattttaagcagtatatcctaggaatcctattctatcgctttatttctgagcacatggctgactattttgatcatgctgagcacgaggctggagatttagaatttcgttatgctaacctgagtgatcaagaagctgagcgagatttcaaaccagggacagttgaggataagggattctttatttttcctagtcaactatttgaaaatgtcgtcaagaatgcttcacaaaatgaaaatttaaacgaagatttagccaatattttccaagatattgaaaaatcagcaattgggttcaaatcagaagatgatatcaaaggcttgtttgataacttggacacacgaagcaacatacttggtggaactgttccagaaaaaaataaacgtctttctgatattattaatggtatcaatagtattaactttggcaactttgaggaaaatgacattgatgcctttggggatgcctatgagttcttgatttcaaactatgcgagtaatgctggtaaaagtggtggtgaatttttcactccacagacagtttctaaattacttgctcgtttggtaatggttggtaaggacaagattaacaaggtctatgacccaacatgtggttcgggttcgctcttgcttcaaatgaaaaaacaatacgaagaccatatcctagaagatggtttctttggtcaagaaattaatatgactaactataacttggctcgtatgaatatgttcttgcacaatatcaactacaataacttcgatatcaagcgaggagacacccttttaaatcctcaacatttggaagaaaaaccgtttgatgcgattgtttcaaaccctccttactctgtcaaatgggtgggagatggagacccaactctcataaacgatgaccgttttgcgccagcagggaagctagctcctaagtcaaaagctgactttgcctttatcatgcatagtctcaaccatttgtctaacagaggtcgagcagccattgtttgtttcccaggtattttctatcgtggtggtgctgagaagaccattcgtcagtatctagtagataataactttattgaagcagtgattgctctacctgataatctcttctttggaacctctatcgcgactacgattttagtgttggcgaagaataaactagaaaataaaacactctttatcgatgcgagtaaggaattcaaaaaagagaccaataacaatgtcttgacggatgacaatatcgaccatatcgttgaattattcactaattatcaaagtgtagactataaagcaactcttgttgataatgaagtgattggttcagaacaggattacaacctatctgtctcaacctatgttgagcaagaagatacacgtgagaagattgatattgatgtgcttaataaagaaatcgctgagactgttgctaagattgaccacttgcgtgcagagatagataaaattgtagaggaactaggaggtaaatcatgaacatcctagaagaaatccaaaactgccccgttgagtggaaagagttgggggtagtttgttctgttaataaaggtaagcagctaaacaagaatctgttgatagatgatggattatatcctgcgtataatggaggacaaacttattcaggaagaactaatgattacaatgtcgaagctaatacaattattgtaagtcaaggtggtgcttctgcaggttttgtcaattttgtagagactaaattttgggctaatgctcactgctattatatacttcccgatgaaactcaagtgaaaaatagatttgtatatcattttttaaaaatgaatcaaaaatatcttatggattttcaacacggcgccggtatacctgcgttaaaatctgataaattaactaaactattaattcccgtccctcctataaaaattcaggaaaaaatcgtgcaaatacttgacaaaatgacagagtatgttacagaattgacctcagaattgacctcagaattgacctcacgtaaaaagcaatattctttttatcgagataaactcttatcatttgaagatgaagtttatcaggttgagtggaagacgctaggggaagtagctaaatttaattatggatatactgataaagcaaaagagacgggagatattagatttattcgaattactgatattgatgaaaatggctatctcaagtcgaatgataaaaaatatatttctttaaccgaagaatctagaaactatctagtaaaacatggtgacttattgatggctagaacgggtgctacatatggtaaaactctatttattgatactgatgaaactagcgcgtatgcctctttcttaataaaaattactccatcagataaattgaattcgagatactattggcacttttcaaagagtgaattgtactggaaacaggctaataatttggtttcaaaggcaggtcagccccagtttaatgcgaatagtttgaaaaatgtaaaaatcccaataccttctctagaaatccagtctcgtattgttcaagttctggacaactttgatatggtttgtaacgacttaaatatcggactgcctaaggagattgaactgcgtcaaaaacagtacgaatatttccgagaaaaactcttgacattcgtcgccgaaggcgagtacactgacagtacagtacagtacagtacagtacagacaagacatcattaggctcttaaattgggtatttggaccaattcgagtggagttgggtagtatttgtgaatttgtaagaggaaatggtcttcagaagaaagattttacccaagctggaagatctgttatccactatggacaaatttacactaaatatgattttacagtagtttacactttctccaaaactagtgaaatggtgtttaaaaagttaaaaaaagcccaaccaaatgatttggtaatggcaactacatctgagaatgttgaagatgtcgggaaagcaattgtttgggaaggaaaagaagagattggaatctctggagatagttatatcattcgtacaagtcaaaattcacggtacttgaattattggctaagatcgatttcgtttcaatctcaaaaggaaagaaaagtgactgggacaaaagttgttagaatcaattcgaaggatatggaaaaatttcaaattgtagttccatccattacagaacaagaaagaattgtctccattcttgaccgtttcaacactttaactaactctctttctgagggcctcccaaaagaaatcgaactaagacagaaacagtatgaatactggcgagaacaattattaaactttactagataaagtctttaatcattttgagaaagaatctcaattaaaataaaaaaggaacatactatggttgattattcaaaaatacatgaagtaattgcggaaacaaatgaagggattctcttggctgagtatcaaccagagtatcgtacagatagggagtatcagtcagaggctgatttagaaaatcagttgatttctgatttggtaaatcatctcaactatgaacgcttaaatattcatacacctgaagagctcttagcaaatgctaaggtgcaaattgaaaaacttaataaggtaacgtttacgaatgctgagtggaatcgatttgtagtagagtatttagactgccccaatgaaggattagttgaaaaaactcgaaaaatccaagagaattatatctatgattttgtctttgatgatggacggattaaaaatattttcattcttgataagaaaaacattcacaacaacagcatgcaagtcatcaaccaggtgacccaagtgggtagtcataccaaccgttatgatgtcaccatcttggtaaatggacttcctttagttcagattgaattaaagagacgaggggttagtcttaaagaagcttttgagcaaatccatagatatagcaaggaaagcttcaatagagaaaattctttatacaaatacattcaaatttttgtcatttctaatgggacttatacacgctactttgccaatacgacagctcaaaataaaaatcattatgagttcacctgtgaatgggcagaccgaaaaaataaaacgattcacgacctggaggactttaccattacctttttgagcaaacgagttcttttagaagttttaaccaagtattgtgtctttgatgctgataatacattactcatcatgcgcccatatcagatagctgcaacagagagtattttacgaaagattcattccacaaatgaaatgaggaatttcggtacgatcaatgcctgtggctatatctggcacactactggttctgggaaaactttaactagttttaagactgctcgtttagcaacagagttggactatattgacaaagtgatttttgtggttgatagaaaagacctagactatcaaaccatgaaggaatatcaaaaattccaaccgaattcagtcaatggtagcaacaatacaaaagaactccaacgtagtattgaagaaaatgatgatcgaattgttgtcacaacgattcaaaagttaaataaatttataacagcaaatccaaaccatgaaatctatagtaaaaaatgtgttctaatctttgatgaatgccaccgttcccagtttggaaaggctcaaaaacgtatcaaaaaagcctttaagcagtatgctttatttggatttacagggaccccaatttttccagaaaatagcttgactggagaaacaacacaagaggtttttggagagcaacttcataactacgttatcacagatgctattcgagataaaaaagtgctgaagttcaaggttgactataactatatcaagcctgaaatcaataagtatagagaagcggaaaaggcagtcggccgagagcttgatgaaaagaaactcaaaaagatggagaaggaactccttttacatccagaacggattgcaaccatcacagagtatctgttgagagtttataatgataagacgcaccgaaatcaacactatactcataaacaaaaacaactgtctggatttaatgccatgctggcagtacaaagcattgaagctgcgaaattatactatgaagaacttcagcgacaacaagcagcattaccagaagctaagcgtttgaaggtcgcaactatctttagctttgcgcctaacgaagaacagtcagcttatggagaaattcaagatgaagagctagaacctcaagatacagctatgcctctttcatctaaagagtttctttctaaagcaatctatgactataatcaaatgttcaagaccaacttttcgactgatgggaaagagtttcaaaattactatcgtgacctttctaaacgagttaagtccaaggaagtggatttgctgattgtagtgggtatgttcttgacaggttttgatgcgccgaccatgaatactctctttgtcgataaaaacctacgttatcatggtttgattcaggctttttctagaaccaatcgaatttttaacaaggttaaaccttttggaaatatcgtatgtttccgtgatttagaaaaagctactcaagaagctattaaaacctttggggatactaataaacttgatattatcttagaaaaaagttttagcgaatacatggatggtttcgtggatcagataacgggtatcaaggttaaaggttatacagaagtctgtcaggaaattctcgaaagattccctaatccacaagaaatagaaacagaacatgataaaaaagagtttgttaagttatttggtgagtttctgaaacttgataacgtgctccgaaattatgatgagtttcaggaaatcgataagcctatctcggaaggatatctccaagatttaagaagttcttacgtggaaattcgagatgaattcttaaaccttaaaaactatgaaagaacaaaagatttaggtgttgacctttcagatattgaatttgagattgaactcttaaaaacggatgagattaatctagactatatacttgctttgattgtcgaaaaatcgaagaactctgagtctaaagaagcaatgaaagctgaagttagccgtgtcatccgctcaagtattgatattcgtgctaaggaagagttggtgattggctttatcaatgatactgatttagcgagtctgaaagaccatgatgaaattatcaatgcattctatgcttatggtaaagaacgtaaagcagtcgctattcgtgaattggcagaatctgaaaatcttgtaaaagattatcaattattcattgatcgttctattcaacgtggttatgctgagaatagtggagctgatttggattcgattattccaccgacttctcgtagacatggagctcgtgaacgtaagaaacaagaagttctacatcagattcaaacattagtagaagtatactcaggtatttgatcatgaaactaagaataattacctaagagaaagatcaattcactattaagaaattttgggtttaataatgaaggatattattaataagtggattgaaaaaacagtagaggttaaatttcaactattcccaaatttttttcgaatgatagaagtagaggggccttccctctattttttatcgaaaaggagcaggaatgcagaaaagacatgcacatgtatcgccgaccttggacatcatggtcaagaagatttttagtttgccggaggtgacggcagcatttattcgggacattttagagctagatgtggcagatgctcagattgtggagggaaaccaaccccacagcatggcctatgaggaggatgatttgttctccactgcggtggatgtgagggccaagctccatgacgggaccgaggtgatcatcgagatccagattcgcaagcagcagtatttcttgaatcggttccattactatttggccaatcagctggtggaaaatgtgcaaaaactgcgccagcaaggccagacacataagatgtacgagcagatggagcccgtctatgggattgcaattttggagaagtcgctcttgctagacgaagaagccgccatcaataaatactggctgaccaatagccggtccgggaagcaacttaaggcttattataaaaatggcaagcaccaaaatcttctgcaggttgcctttttagagctagacaagtataataaagatgagaacctgacagatgcaggcagacagtggttggagttttttgggaatcttcccttcacaaaagctcccagtcaggctgtagcccacgcagattcattattagattcatctagctggaccaaggaggaaaagaccatgatagacgagcggattcggattcaagaaaattatgatatgaccctggagacagcgatagacgaagcacgcgaagaaggtctggaacaaggtcgtaaacagttggtatgcgaaatggtctcacgaggaatgacacctgagcttatctcagatatgacgggtttatcgctggaagagattgagactcttctttcttgagtcgttaaaagaggcactgcctcttttctttttgaaaaaacttgaaaattttcccattttttcaatccgcctttctagaattgtggtagaatagagtcaacaaagagctatcctcaccaacagtgtgatcgatactagaaaagaggattctgatgacaagaaaaattggtattattggtttggggcatgtgggtgcgaccttggcccacagcatgattttgaaacacacctgtgatcatttggttttgattgataccaatgagaagaaggtcaaggcagatgccttggatttctgtgatacagttgccaataccgggtatccggttcatatcacggtcaatgactacgcggctttaaaagatgcggatgtcgtagtgtcgactcttggaaatatcgagttgcaggctaataacacagatgaccgttttgcggagcttcccttttccagcaagcaagtggtgcaagtagcgcgtgatttgaaagcttctggctttagtggtgttttgctagtggtgaccaatccggtcgatgcggtcactcaactttatcaacaatataccggccttccaaaagagcaggtgattgggacagggaccttactggacacagctcgaatgaagcgtgcagtcgctgatcgtttgcaggtttctcctgctagtgtatcaggctacaacctcggtgagcacggaaattctcaatttgttgcttggagtcaggtccgtgtcaaaggacatgccattaccgatctcttctctcaagaagagcttgacgccatcaactacgagtccttgcgaggcggccacacggttttctttggcaaattctataccaattttgggattgcagcagcagcccaacgcttagcagaagctgtgataaatgatagccacgaggaaatgcctgtgtctaactatcgtccagaatatggaacctatcttggctacccggcgattgtaggtcgaaaaggaattattgaacgattggacttgcatttgacagaagaagaaaaagaaaaattactccattcagccgaaaccatcaaggaaaatacacgaaagggattggagcatgcataaaagcaaagagagtgggacagaaatcggtaattcgttagaatttgatttcgtcgtcccacctccgcacagttgagtagggctgtaaaagctgatgaaatcagcgtagtagagcccactcaaccactgcgtcttgctcgacaatccaaaaataattgagaggctaggacttttgtcccagcctctttttctgcaattttttcgaatggtataagtgaggggattccctacacgaaatcattggaggttgctatgaagaaacgacacgagtatgtatcgcccaccttggatttaatggcgaaaaagatttttagtctgccggatgtgacagcgaaattcatccgcgaagtattggatctgccagtagagtccgttgagattttagaaggagaccaaattcatgagcaggggtttttaggagatcttccgtttgaaacatccgttgatgtgagagcaaggctagatagtgggcttgaagtgatcattgagattcaagttttgaagcaagagtacttcttgaatcgtttccactattatttagccaatcaactggttgaaaatgtccaacgcaagcgaaagaaaggagcgacccattctatgtaccaggagctggagccggtctatgggatcgctatcctggagcgaagtatttttcctcagttagattcacccgtcaatgtctatgaaatgcgccatacagtagacgggacacctctttatagctctcgaaaggatggagtagcgcacaatatgttaaaggttgcctttttagagttggataagtataatgaaagtagagatacggagttgaatgctcactggagacaatggcttgaatttttcggcaatcgcccattcagtcatcaaccagatcaagtgatcgagcaggcagaatcactcctgatcccatcaaattggacaagggaggaaaaagaaatgattgatgaacggattcgtatcagagaaaattgggaaatgagcatggatacctttcggaaagaacaactggaagccggttttcagaaagggttgaaaaaaggtcttgaacagggactcgaacaaggtctcgaacaaggtttagaacaaggtctcgagcgtggtcttgaacagggattggaacaaggcagacaagaaggcatggagttaggagttcaagctggtcagcagtctctgattcagaaactggctttgaaggggatgagtatcgagatgattgctgaaatgacggatttatccagcgaatccatcaaaaaaatgttggctacggattcgtctgacgaggagtagtagcgtgaacagaattttgggaacaatgaaacttcgagaattaccttgctgagaaaaaagtagttctaaaatggattgtaaagatcgtcaggagttcgttatttttggatcttgatcctctacagatttatacggttatgatttattgaaggttggagacttttgtccaaccttttttctcattcttcttggcccatccttagtgaaatggaataaaagtttaaaatgtccgagttgtaattcttgacattacatctaggggatgtataatattacttgtaacaaatgatcttacaacaaaagaggtaataactatgaaaaacattttatttatcgtcggatcccttcgtcaaggatctttcaaccaccaaatggcccagaaagcagaaagtcttcttgaaggaaaagcaacggtgacttacttggactacaaggacatcccaatgatgaaccaagatttggaaacgccaaccttgccagctgtgcaagcagcgcgtgatgcggtccttgctgcggatgccatctggatcttctcaccagtctacaattttgccattccaggtgtagtgaaaaacctgatcgactggcttagccgtgcccttgacctgtcagaaactcgtggtccatctgcccttcaagacaagatcgtaaccgtctcttcagtcgctaatgcaggacacgagccaatgtttgcggcttaccaagcgctcttaccattcgttcgcacccaagtagtgggtgacttcacaggaacaaccgttaacccagaagcttggggaacaggtgaattagtcttgacagatgaagcagtcgcaggattggaaaaacaagcacaagccttattagaagcataagaaaagctgagacagaagtctcagctttttagatactaaagagttgtccgaagaagtatgtcacacccatggtgagaaggccaatgatgagattgcgaagcatggcctgcttggttggtgcttttcccagttttgcactggtatagccagtgaagatcaaggatagtccaacaacgaataccgtcaccggaatacgataggcagttggaaagataataatagagagcattggaggaagggaaccaaccgaaaaagcaaggaagctagaggcagcagcatgccaaggattggtaaactcctcgtattcgagaccatatttctcttcgaccagagctttgagtggatgtttcagaaaggcccgttctgtcaaaatctttgcggaagtttcgcattctccattttgaagataagcgtggtagagagattctctcgctaacttgggatcgtgatccaacaaggcttgttcgcggttcacagcggcttcttccgtgtctttttgtgtggaaacagagacatactcaccgcccgccatcgagaaagcacctgccagaatcgccgataagccagaaaggaaaatgatccagatgtttgacgtggcactggctaccccaatcaccaccccagcaatagaaatgattccatcattggcaccgagaacagcggctctcaagatattcaatcgatcgctaaatgattcatctactccatgtttcatttcagtcatacaatgtctcctttatcttatttagaatgattataaataaaatacaaaaagaaagcaaggattttaactcaaatgataaaagttcgacaatttaatgaaatttaagttataatctttggcattgcaagcaaaaaagaaagaatagggcatacgcctattctagcaaggtttatttagcggaagtggtcttacctttgaagatcctgatggcattgtcacacgggtcagaaaaggataataaaaagggagtgggaaagaactccaactaatttagaagagttcgttttcccacccccgcaaagttgattaggtcttctttggagcttaattaagcgaacaaagatgccaatcaaccactgcgtcatacagttatttctatcaaagatcgaaggctggacagtttattcccagctcctttctgatgagaaaaattaattcgtatcttgttctttcccaacaacccaaaataagagaaggagttggaagatgcccaaggcaaataagaccataaaaccgttgcgacttcctttagcagtggcttgagtaaagtccatcttttgattagcttggctcatggcaactatcagcgaagccagggttgttccgacagcgcctgcaaattgttgcagggtgttaaagatcgcgttcgcatcgggttgctcttccagagacagttgtttttgtccgttggtcataatattgccaaaggctagacccataccggtcatgaagatcatgtaaaagacaagaatcaagacatttgataacttcaagccaaagagtgtgaagaagaaatgagccagaaggatcaaaacagctccaaggagaattggtctgcgggcgcctagtttatctagaatgagaccggagaaaggagcaaagccagctccgatgatggctcctggaagcagcatcaaggctgcaagcgtagtgcttgagtggttgaccaattggatataattaggaagaagaaaactcatggcaagagagcctaattgaaaggtgaagaaggctagaatatggccagtgagacgatgatttttcaaaatagaaagattgataatgggagtctctaactgattggaccgccagaccaaaaggaccagtcccaaggttccgatcaccagccaaccaagcacagaaaaactgaaaaacgcatgatccgctaggccatgaatacctagaatcaaccctatgaaaagggcaatgatggcaagaaggctcacgatatcaaaggtttcccgcttgactttactgatttgctcaatggagcgaagtcctgcaactagtgaagctagaaggatcgggaattgaactaaaaagatggaccgccagccgaagctagctgttaagagtcccccgacagtaggccctatagcgggtgcaatggctgtaatcaaggtccccactcccatcatgagaccgatcttacgttttgggacttgttctaaaatgatattaaacatcagagggagggcaaaaccaacccccattccttggaccaatcgccccaggaccacaaagccaaaatttggagctaagaagtcgataagaacacctaaaacagataggagatttccaactaaaaagatggacttcattttaaaagaacgcttgagataagcagataaggggaccacacaggcaaccactagaagatagatggtcgtaacccactggacggttgcggtgttgatttcaaattccttcatcaatatcgggaaggtgatattcatggcagtctctccagccaccccgcaaaaggacaggatccctgtcgcaaagatcgcgaacaagaccttggctgaaattttttcttgtgacatagacgtctgattcctcctaaatcttcctaaagatatggactatggtataaaaatcatggttacgatctgattttccgtcagctccaatcgctaggagcatagcaggaccgacggtaacctgattcatcgttttgttagctaacaaatagtatagaggaaatgaagacccctgtcaaagagtttttcaaaaattatgaaaattttaaaagtattctcaaaagatgatgcttctccaaatgaaagggattgctcaccactatgatataataagatgaaagcaagcaatgtgaacacaccaatagggggcgccatgaccaagtatttagtccagaagtttttctggttacgagaaaaaagttttattcagatttcccagaaaaccctggtttccttatttccttttttcttattttcaggaatcattcgagtgattgccttatcggtcttttctgatcgaggctatatccatcagctcttttcgatggacagttggttgccatggaatcaagctatcagccaggttcttattaatttttccaactttctaggaggtctagcagggcctttagcaacctacttcgctgggaaatatacagctgggcactatggtagaagtacggggacagccggcgtgactgctcttttggtcagcttgattgtagggtctcaggaattgttggtgggaccactcaatgatgggcaactgacaagaattaacttacctgcgacgaccaatatcctcttagccattgttttaggctatctaatcggacagatctttcgactatccaaggctagtgacgaccagattgtggacaaagactttatctatcagcccaagactgtgcgtcccattttcttgtccttggttctgggggttagcctgaatattcttctccttcttggcaatcagtaccgtatttttcaaatgatcggtcaattctttagctctctgactataagcagtcatcatctcctgtccacttttgttatgggactcttcagtggcttatcagcttgggtcggcaacagtcaggcttttgccctaaactcaattgtggatgacagttttgctttagaaaatctgaattacgctgtgacccatcatacaacgacggggattcctcatctctatactttgaccaatttgtatcggagttttggcatggtagctggaattggcgctgtcctagcacttttggtagcgatcttactggtctcccacagtcgaaaggacaagaaagtcagtctcctcagtatttttccaggcctctttaataacggtgcccccttcatggtagggattccggtcctgctcaatcttctatatgtgattcccttcttattgatccccttggtcaatatggccatcgctgctgtggctttgtgctttaagctgatgccagcagccgtctatccagtgccagatgggactccgagccttctctatgctttcattggaacgggaggaagtctgagagccttagctgtcagtatactttgttttgcgatagacgtgctcctttatctaccatttgtccgcatgggaaatcgtattcgaaaagatctaaaagtgaaaggagaaagcgatgaagcaatctaaaaaaacagcgatcgtcctcactttggtctgtcttttcttgatcggtttagccattccttcttatagctggactcgaaccaatgtttcaaaaatcgagaaattttataattccaaactgtcgcccatcatcatgattccaggaagctcagcaacagagaaccgctttgatggcttggtgaccaagctcaaccaaggccgccaaggcaccaagcacagtcttctcaagctcaaggtatggaatgatgggaatatcacctatagcggtagtattgatgccaaggacaatgaaccagtgattgtggttggttttgaaaacaacaaagatggctatagcaatattaaaaagcaggctaaactattcaatcaagcctttgaagcccttcaagaaaaatacaattttaataatttcaagggcttgggtcattctaacgggggcttgatttatacagcctttatcgaaaattatctagaagattatgatgtggatctcacgaccctcatgaccatcggaactccctataatttcacggaaaccaatattcaaaacaaatctgagatgttagccgattttatcaaggggaaaaaagccatccctaatacgctttatatgtattcagtagcaggaaccatcacctatgattccgatgagttggtcccagatgccagtgtttctgctgggaaatatatctaccaaaaccaagctgctagttatacggagatcacagtgacgggggaagatgcccagcactcggaccttccaaccaatgatgaggtggttgccttggtgaaagagcatattgaaagtcaaccggatcgtagaaccaaaccaaataaagaaaactaattgtggctgagcaaaaactctccagacttctatgtttaataagcataactgtatgacgcagtggttgattgctcaaagcactgctttaaggtggtagataggacttgcgaagcaagtttcctaagtattcgttcgcttttcaagctccaaagatgacctaatgatggaaacaaagtttcctttatctacaaccttcaacagtctcccagactgttgaagctatgcgggggagggaaagttgaaaaggtttggggaaccttttcaacctttttaattttaggagttctttcccactcccactttttttagtataataaagatcagtatgaaaacacgggagactaaaggagatcagatgaaaagaaaacattggatgcagttgggattagcggcttcgagtatggtcttgttaacaggatgttaccaaagataccagcgccagtccagtcctaaaaaagaggttgcaaccagccagacttcagcaaagaaacaagcatacaacaaacaattataccagtctgttttttcagactatcaaaagatttttgccacttcaaatgatttggatgctatttccaaattaaattctcaattagccaaagaagatcgaatgatcaatagctgggtgatcgagactgtcatcaatcagccagaagccgttcgctatgcctttaaggacttaaatagcgatggggtagatgagatgatcatcgccaaccagcaaaccgatgggagctactttgcgacaggagtctactacctcaaggaccaaaagccgaccttgcttgcagaaggtttcgttgctggacacggaggagcgcgcaatgcgacaaccctctataagggaggagaagtcctggaagtcagctggttgtcgggaactggccgtggtgtagccgtgctttcacgaatagaaaagacacctcaagccgcgacaaaagtccaggaagaagaagttcaggtacctgggtcagatctgaatgccctctttggaaaatctgatgaggataaactggatctcaagagttttgactggcaaacctttgaaagcacaccatcaggaggcgatacccaaagccaggggaaaacgccatggaatgctgaaaaatcagcaaaattagcagaatttatgaagacctggggtcaaaagatggggcaacccaactaccaaaaaggcattgctggcggtgatgtaggaccagacaacctctatactctaggggacaatagcaagatggatgctatttatacagatactggtcaaggaaatgcaaaataccgaatcgtagaacgctatagcaattgggacaagtatccagatgtgcatagttatttctttgccattacagatacaggagaggggatcgtctttcattccccaacgaccaatggtggaaagatgtacctaaaaccaacagacaacaaggaacttcaagaagaatttacgcaactgcttcatcaataaaaagaagaataaaccagaaaacgactgtttttctggttttgtttatcccaaacaatgaataaaaatacaaaataaacgatatttttcaggatagaaaatatgttaaaaactagtgataattagcggtatacaagtgtttaaaaacagaaaatgtttgacaattaaaggaaaatcatttaaaatatattcattctttatttataggagaaaaaatatgaaaaaacttcttacagccggtgtggctctcttgtcagttgcaacgttagcagcttgttctggtaaaactgcttcagaatcatcaagcaaagatgcaaaagcttcttctagcaaagtagaaaaatcatctacttcagaaagcaaatcaagcagttcatcaaaatcatctaaatcagcaacctcttctgttaaaattccagaaattgtcttgttgactgatgatgaaatcgataatgccaaaacaattggtgatatgaaaactctttatagtaaattagtggataactataaaaaatatgctcaagatattggcgatcaaattcccgaatcactgagatctaaatatactcaacaagtggaaccagctctcaagacattggacgaatcaaaaactcaatttgatacagcactttcaactggtggttcagatgatacggttgttcctgaacaagggcgtactgtttttgtacaacaattgaaatctggacgtgacactatgaaacaagctcttgaaagtgcatataaatcaattgcgccattgctctcttcatcagctgaataatcaatgaaaaaaatagggtaggacctcaagtcctagcctatttttgctttcttacaaaaatgtaagaaataaagggtaaaatgtaaggttatgttatggtgaaagcgtttcagttttagtacaatagatttgtaaaaaacgattgaagcttttatcgagctagaaaggaatggaccatgaccctactagacgttcaacatatcaaaaaaatttacaaaacccgctttcaaggaacgcaggttgaagccttaaaggatattcacttcaccgtggaaaagggtgagtacgtggctatcatgggggaatcaggatccgggaaatccaccctcctcaatatcctagccatgctggatcagccgacggaagggcgggtctacctcaatggcaccgatacctcaaccatcaaaaacaaggacgcctccagcttccgccgggaaaaactaggctttgtctttcaagatttcaacctgctcgacaccttatctgtcaaggacaatatcctcctgcccttggtcctttcccgcagaccaatcaaggaaatgatgagtaaggtcgatagcgtgagtcgggagttgggcattcaccagctcttagaaaaatacccttacgaaatctctggtggacaaaaacaacgggtagccgtagcacgggccatcatcacctcacctgaaatccttcttgcggatgagccaacaggggcgctggattccaagtcttcggcagctttgctagatgtctttgaagatatcaataccatggggcaaaccattctcatggtgacccactcaaccgcagcagcagctcgggccaagcgcgtgctctttatcaaggacgggattctttacaaccagatctttcgtggggaaaagacagagcgtcagatgttccaagaaatctcagatactctgacggtcatggcgggaaaggaggatcctgatgtttaaattaacaagtaaattagcactttccaacctcaaacaaaatcgcaagttgtattatcctttcgctatagctgtcattttaacgaccatgatcctttatagttttatcgccttgtcattgacccctcatttagaggattcttacggagggggatcggcgagaactgttcttggttttggcagtttcgtcgtccagctggtcgtcatcattttggtggcttatgccaatggctacgtcatgaaaaatcgttccaaagaactgggactctacagtgttctgggaatggagaagaagcatctcctcatcatgaccttatgggaattgctcttcttctatgttctcacagttggagtaggactgggtttgggactcttgtttgatcgcttgattttcgccttgcttctaaaatgtatgggtttaccagtcgtcattcaatcaaccttccagatagaggctgttcttaacactttacttgggttagccttagcttttggcctcattctcttgttgaattctttccgcctcttgcgctacagttccctccaccttatgcagcaaaagaaagcaggagagaagaagggacgcttcttgctggttcaaactctgttaggacttgggctcttaggaattgcgttttatatagcgctaaccgttgagcggccagttgcggctgtccaaggattctttattgccgtcatcttggtcattctagcgacttatctcttattcaacgcaggctctattaccttcttaagatttctcaaaggtcggaaatcctactattacaagccagagaattttatatctgtctccaacttaatagctcggatgcgaaaaaatgcagcgggccttgcgaccattagtattctatccaccatggtcttggtcaccttaaccgggtcgctcaatatctttattggagggcagaattacctagatacggtttacccttctgattacatgattagtgtggggcatatgccttcagatgctgaaacagaatcggttattgaggatgttcaagctcaaattaagaaaacagccgatgcgacacatctatcagattatcaggtggcacagactacatactggtcggctgaaattcgaaagattgatggaaggagcttagaggtgaatgaccagtccactccatcaactggtcaggagttgaagtcagaaggaacagtctacttttttgatcaggcgacttatgagcaactgaccggtcaaaaagttgagcttggggaaaatgaaatcctagcctatgggtatcaatatcctggaaaattagacgcacaattagaaatcaatgggaagaccttcacgattaaagaaaaactaaactccaattttatccaagggaaactccctcaatccgacctgtttcaacaccaaatgggcttgtacctggtcctccctgacttgaaccaactgggactaaaagttgataaaaatttggaattctctattactgctaaaaataaagataaccaagattttatttctggcttgatcaaagagctgtattcgacagacaaaatcagtcaatatggtgcgacttattttggtggatttgatcgatacagtatagagaaagattggcgtgaaacagcagggactcttctatttatcgggatttttctatcggcgatctttctattagctacagttctcgtgatttactacaagcagatttcagagggtcatgaggatcgagataattttgtgatcttgcaacaagtaggattggaccaaaagcaaaccggcaccaccattcgcaaacagatactcactgtcttttttcttccattattcttctccttcctgtacctaggagtagcctacaagatgatcgcaaaaatcgttgctatcttaggagcaaccaatgcgggcttggtgcttcaaacaactctttctatctgcgctgtcttcttcatctcctatgtccttgtctttcttctgacttctagaagttatcggaagattgtcgtgaggtagcgttcgagtctataaaagattagaaataagatgaaacatacaacattttgttagcacaaaaaacaccgaggatcaaatccccggtgttttctatcacgattatttcacgtgttttgcaagttcttcttgcgcttttttgtttgattcttctttttctttcaaccaattcttataagctttttcgtaatcagcagttgtaactgtcttatcttgaactttttggtatttgaagaagcttgattcacctttaataccaattgcagaatttgctgctgagaatggcgttaccttcgtgatagatggaactccacccttagagtagattggaagtaccattgcgttttcagtcaaccaagcttgggcagcagcgtatttttcataacgcgcattggtatccaatttttcagcattagcagcatccaacaattctttgtattggttcaaaccaattttttcgatgagagcttggtctttcttaggatcaagtcccataccagtcaaggttgaaccatctgttgggttcaagatatccaagtaagtagatggatcttggaagtcaggtccccaacctgtgatatccatatcaaagtctttttgatctggtgattgggcgaagtaagtagcgttgtctgcatcgtctgtagacaatttttgtacatcgatcacgacattgtctttaccaagagctgtttcaatagaactcttcatagagtctgcttgttggacaagagcattagaagattggtctacgacatagtcgatatggattgggaattgaacaccttgtgattgcaattcagatttcgctttttcaagttccgctttggctttatccgcattatgcaagctatcttgcgcgtcagcaaagctaacacctttccactcatctcctgttgcggcaagtttttcttcaacgagcgtaccgaagtcttttccgttggcttgcacaaatgttggtggaactagaagggtacgtagagtttttgatgctccgtctttcccgttaacttgagcgctgtaggaagttctgtctaaagcaaagttcaaggcttgacggaaattcttgttttgaagagctgtcttagtactgttcttttgctcatcagacgtcttcttcgtatgaccgtagttttgacggttaacgttgaagtaagcgtagtaaacagtagaatcttgaggtgtataaacgatgttatccttgaatttcttctcaattgtgctgtaagttgagcttgttgggaagagacgagcagtagataggttcccatctgagaagttacgagcaagatagtcttggtcagatccatcgaagtaagtcaatttaaccgtatcgatgtgaacatttttcttgtcgtagtaatcagggtttttatccaactcgatttgtgattttgaagtgaaggatttcaaaatgtatggaccattgtagaggataccatttggtttcacgctaccaaagtctttcccagctgattccaagaatttttcattaactggcatcatggtagcagtcgtcaatttagaattccagaaagattctggttggttcaaagtgtattgaagagtgtgatcatcaacagcttttaccccaacagttgagaagtctttggttttcccgtttacatagtcatccaagcctttgaccgagttttgaaccaagtaaagagcatccgattttttatctgctacgtattttagagatgtcacgaaatcttgtgcagtgacgtcagcgtattcatttccttctgaatcataccacttcgcatcttttcgaagcttgtaagtataagtcagaccgtcttttgaaacggaccagtcctcagcaagagcaggcactaagttaccgtattgatcgttttcaaacaaaccatcgaccaagttggtagtaatgtcgcttgtagttgaacgatttgaagtcaaatagttcaaggtatcagggtctgtaccatacacgtagttgtaggttgtcccttttgacgcattagaagatgagccacatgcagcaaggaaaagcgttgaagctgcggcgacacctgctaaaagagcaagcttcgattttttcatattcgtgtctccttttgaataattttaattattatactccaatcaatcgacaaaataaagtgttttttgaactttttttgtatatttacacacgagtatacagagaaaccttgattttaagggatttttaaggaataaaaatttttttgaaaaaagttactattatgctttacatactagccgagaaagagtatactgatagtgaaaagactagtatgtaaaacaaactagtggaaaatgtgaagaaagaggtgagaaggatgaaagagtcccaattactaaagggagtcttggagggctgtgtgcttgagattatttccaaaaaggccatctatggctatgaattgatccaaagtctcaaagagatgggatttgataagattgtcgctgggaccatttatcccctgcttcaaaaattagaaaaacaaggggttattcatggggaaatgaggccgtctccagatggtcctgatcgcaagtatttttcactcagtgatgctggaagagagcgcttagaggaattttgggaccagtggcaggagctggtcacaaaagtagaacgtatcaagaaggagggggaagaatggtagaaagttatacagaaaaaatgtccgatgaattgattcatttaaacaaagaggatcaaacctatatgaaaaaaatggtggcctatattggggccaagtcctatttttatgatgatgaagcactcggtgaacaactctacaatatggtttgcgacctaaaagttgctgagaaagaaggcatacgggcggtggattattttggaaaggatccacgggcgatggtggatcaagttctttcagacttgcctaaacgctctttaagatcttatgtgggactcgtctccatacttggagggatcttagttggcatgcgttatttaatggattttacctggatgacgccactgaaaatcgaacccctgacctatgttgtcattctactcaatttcttggtgttcagccagttcattacgtggctttggtccaaacagagctatggtgaaatgaagtggtcgtgggctacttttatcagtatgatcagcctgatggtatttctgaacatcgtacgactattttcgatctattttggccacattggaagtctcttcttatcagatggttgggcgattgttcttgctgtcctagtcctacttggatttgcggttatggctgttagaagcagggagcgtttgatgacgagtctaatagtcatgggccttactttcctagttactggatgctggattcgtcttgtgaatcaggaaactgctcacttaataggctggctacttcctctcataggactagtcctaacccttattgtattttgtctccaaagaaagaaggaagaagcatgaaatcagcaatgtattttgaagaaacgcaggccttgatgcaaacctttagccaggaggaccaagcctatttccaagatctctgggattatttcaatcttgcaggtttcttatatgaggagaaagccttaagagagcaggtctataatctagcacttgacttttcgcaagcaggagcggatggcctcacggcaaaggattattttggtctcgatccaaagggaacggcagaccaaattatcgaaaatatgcccaaagaatcgacgcggtctgttttgaaatatggggctatcttttcaggtattgtgattttttttcgcctcttaagtgattttgcttctcaagcggtccttgtgctcaagcctctagtctatttgaccgacatcattttgggactcctagctgttgggataatcttctatctccttcgtcgcttcatttttgcggaagaaaaagcgaaaaaagcaatttatgtagcatttgttctagttctaggatactattttgtcggtgaaatagtgggcgtccgtttcttgcctgcttttgcttggtttgtagtccctagtccttgggatgcccttctcatgacaggggctagtggagctctcattctttggcaatggagagaagagtttggacgagctttcatctttccgatcgtcgcctttttagtggttggattcttacatcgctggaccttggcacaaggagttcagaatcttggtatgacggttcttctgcccacagtgatcatcgtttttgggctggttatttattattggtttacgattcgtgctttgaaaaagaataggacggaaagtgataaatagaaagaaaaggggggctgggacaaaagtcctagcctctcaattgtttttggattgtcgagcaagacgcagtggttgagtggtcaaagcactgctttgaggtggtagataggacttgctaagcaagtttcctaagtagttgttcgcttttcaagttccaaagatgccctactcaactgtgcggaggtgggacgacgaaatcgaattctaacaaattaccgatttctgtcccactccctttcttgttcaagtatgatagaataaactcattagatgggagaatagatatgaatttatttcgaaaaaagggacttgggcaagtacacccgggtctaaatcgccatttacgattgtgggatttgattattttaggaatcggtgccatggtggggacagggatcttcacgattacagggactgcagcagcgaatttagctggtccagccttgatcatttcgattgtgattgcggctttttgcgttggcttatctgccctcttctttgctgaatttgcgtctcgcatcccttcaactggtggagcctatagttacctctatgccatctttggagagtttccagcctggattgccggttggttgactgtgatggaatttatgacagctgtatcaggggtggcttcaggttgggccgcgtatttcaagggcttgttggccaatcttggctggagcctgccgacagctttaaacgggacttttgatccagctaagggaacttatgtggatctcttgcctattttggtcatggtcctcgtcacagccttagtccttatgaatgcaaaagcggtcttacgctttaattccttgttggtcttactcaagttttcagctctttccttgttcatccttgtggggatttttcacctaaaccctggcaactgggcaaactttgccccttatggatttggcgaaatctatggtggtcagacagggattatggctggcgcttcgctcatgttctttgcctttcttggttttgagtccatttcaatggcggtcgacgaaatcaaggaaccacaaaagaacgttccccgcggcattgtccttagtcttttgatcacaacggttctttatatcttggttaccctggttttgaccggtatggttccttttaagaacttaaatgtagaagacgcggttgcctttgcccttcgtcaggtcggagccggctgggctggaaattatgtatcgctagtcgctattttaaccctaatcaccgtctgcatttccatgacctttgccctctcacggatgatttacagtttggcgcgggatggccttttgccaaaagctatgaaacagcttgatccaaaaactagaattcccaaaaatgcaacactagtagctggatcgatggcagccattgctggtggagtctttccacttgcaagtatcgcttccttcttaaatatctgtaccttggcttacctggttatgttggcccttgccctcttgaaattgcgcaaggaacacggggctcctggacctggtgaatttaaaacgcccttggttccagtcctgccaatcctatcgattgtggtctgtctgtcctttatgacccagtattccctatcgacctggctggccttcggagttgctctcttgatcggggttggaatttatttcggttatgggtatcgccattcagaagaaaatcaataaaacataaaagctagagtagtagaactctggctttttacatagagaaagctctttttttggtataatgaagggagaaagttaaatagataacaaaggagaaaaacatgacatttgaagagattttaccaggcttaaaggctaagaaaaaatatgtacgaacgggttggggtggagcagaaaactatgtccaactttttgataccattgagcaaaatggggtggctctagaagtgacgccttatttcctcatcaacgtctctggtgagggggaaggcttctctatgtggagtccaaccccttgtgatgtcttagcgacagattgggtggaagtccatgactaaaggggtcttgattacaggtgttagctcagggattggcctagctcaagctcgactctttctagaaaaaggctaccaggtttatggcgtggatcagggagctgatccccaattggctggtgattttcacttcatgcagcgggacttaactcttgatttgacgccgatttttgactggtgtcctgaggtagaggtcttgtgtaatacggctggggtcttggatgattacaaaccgcttctggagcaaagcgctcaggagattcaggagatctttgagatcaactatgtgactccagtggagctgacgcggcattatctgactcaaatgttggagaataaaaaaggtatcatcatcaatatgtgctccattgcttctagcctggcaggaggaggcggtcacgcttatacctcgtccaagcatgctctagcgggctttaccaagcagttggccctgaattatgcagaagctgggattcaggtctttggcatcgcgccaggtgctgtcaaaacaggcatgaccgcagcggactttgaaccaggtggtctggcagactgggtagcaaatgaaacaccgatcaaacgctggattgagccagaggaagtggctgaagtcagcttctttttggctagcggaaaggcatctgccatgcaagggcaaatcctgacgattgatggtggttggagtttgaagtagggaaatgaaaaagcaggagctaaaatcttgctaagaaatgtaattgttttttccttaaaaacacagggataataacaattatgaagataactgagggtaagttcagaagaactttttgaatgggctacctgaaaccttaagagattgttttagaagaaacgaatagtacaattgatttgctaagttattgtggaatgaaggtgaagtcatgattaaattagtgaatgttactaaatgttttagtgatggatcgaatgtcagatatattttcaaaaattgtaattttgaatttaaaaaaggtagcacgactgcaatagttggccgttctggattaggaaaaactactcttgttaaattaatattagggattaccagtttaaatgagggggatatcttagtctgtggtagttccattttagatatgaaaaatttgagtaaggtaaggcgtaggaatattggctgtgtcttccaaaactttaatttgatttcaggtttcacggtgaaagagaatattctacttccaagatatttttttgaaaatggagagaataacattaacgaaatttgtaacactctaggtctttcaaaggaaatgttaagtaagagtattgataagattagtggaggtgaaaaacaaagagttgctttggcaagagctcttattaataatccagaaatattgatagcggatgaacctactggtaatttagacgctgctaacgaacaaaatataatagaattgttgaagcggatcaatgaggagttaggtatcacgattataacagtaactcatagtgataaggtggcgaatagtatgcagtctatttgcacagttgttgatggcaaaattgagtacgtaaggagatgataaaatgaatcattccatattattcattgctaaaagagatttagaagttaacaaacgaagatatagattagttcgactgtcgatagcgatctctgttttgctaattgttttagtgatgctcatttctaattctttctataataaaatgattaatgaaatgactgtagcaaataaaaatgttgttactgttgcctttggtaataaagaaaattctctgaattataaagctttgcctttattttctagtgatgatattgatcgagttaaaaaaatagatgaagtaaaaaatattacaggtgtaaaactactatttacggatgatatcaaattccaaaatggtaagacatcggtttccaatactatccattgtctagaagaaaagtatttaaaaaacctgaatattagaattgctgaagggaaatttccagagaaggacgatgaaatattaatcggagattccgtacacaaggctacatcaatgaatgtcggagatacggtgactattaagattgataatcattatgaaaagtttgtaatttctggcattatagacaagcaagaagcgcagttattttctaccttgccaacagaaataaatcaaatgatggcaatcaatgtaaaaagtagtagcgtttcatcaaataagtattactatctgaatgctactgtaaaaaatggaaccgatttaaatgaagtagcaaacaagatagaaaagactgttttaaaaaatgaaaatttaaaacaatctttatcaggaacaggattagatgttgttgtagcaacacaacaggatgttatcaatatgctatccagatggttttcctacatcgacctttttatcctcttaatcatagttcttatctctattgtagcgattattaatatcatcaatattctagccattaccattcaggagaatcataaacagatcgcaacttttaaaatcatcggtgcatctgatcgacagataaaaagaatatatttatttgaaagctttatgatgggagtacgaggtacaagcgcgggattggtgataggaattgctatttcttatttaatcatctttttgagtgggttaccactagatattgaacttaccagattgttgttcccggtattaatagggatactcacttcagtttttgcaggattattggtatctagaaaaattactaaaattgatattgaaaaggtattaaatcaatagagaagaaatgattagggtcaataagagatggtgttgcaaaaagaatagctatactggtttcactatcgactgagctttgaatgaaagtaggaggatttgatggaaatcaaaaatcactttggcgtctacggagtctgttttaaagacgggaaactgctctgcattgaaaaaacaagaggcccttatcagcatcgttttgatctaccgggtggtagccaggaagtaggggaaggactgacagaaaccctaaagcgagaagttcttgaagagacaggctatacgcttagcagtttttcaaatcctagaatttacgatgtgatggttcaagaagaagggaaagactttgctgtacaccatatcatggtcttttatgatatagaacttgatttcgaaggccctcaaaaaccccttcctcaggaggttcttgacggaagcaatgattcagcaaaagcaatttggttgaacgtggaagacattactgccgacaatgcttctcctttagtattgaaggtgaaggcagagttaggaggatttccagaattagaactgacaagctatagaaattggaaggtaaaagaaaaaaaggagaacctatgacacctcaagaaatgtggaattcatacaaacaaatcaacccctcgattggagatgagatagatgcctgggtgtttggagtggatccagaccttttagcggaactggtgtttacaggcgaaaaaacagcaacagcttcagcttatgacctctatgcactagaggacgaaccccttccccaagaaggaacctttgatgttatcttagacagtcaaaaccaagctatctgcattgtcgaaattaccaaggtttctgttcagcccttccatcaagtgtcagccgaccatgcctataaggaaggtgaaggagataaatccttagcttattggcgtcaggttcatgaggagtttttcactgagtggctggaggaagcaggtctgacgtttacacctgacagtaaggttgttttagaagaatttcgcaaggtttatccattatagaacatgctctccatttagaaaattagaaaaaagaataactgtttttatacaaaataggcctagtgattgtgacaagctaaaaatactgcccagttcttagaactattaaaagattttttgagactttccgctgtgagaaaagtgagagtgggacagaaatcggtaattcgttagaattcgatttcgtcgtcccacctccgcacagttgagtagggctgtaaaagctgatgaaatcagcgtagtagagcccactcaaccactgcgtcttgctcgacaatacaaaaacaattgagaggctaggactttagtcccagcttcgctcgggagttttgaaactttaggttcaaaactaaatcatggaacttcgaagaagttcgctgatgtccgtactcacctaaggaaagtctcaacgaagatatgatcttaatctgactctccttctaggagagttttttgggttcgggtcttattttccaaaaggggtgaaaaatggtataataagtacgatattgtacagaaaagagaaatgttatgccaaattatgccattattttagcagcggggaaaggtacccgtatgaaatcagatctgcctaaggttcttcacaaggttgcagggatctcaatgttggaacatgtcttccgtagtgttggagccatctcacctgagaagactgtaacggttgtgggccacaaggcggaattggtggagcaagtcctagctggacaaacagaatttgttaaacaaaccgaacaattgggaactggtcatgcggtaatgatggcagagccagtcttgaaaggtcttgaagggcataccctcgtcattgcaggagatactcctttgattacgggtgacagtctcaaacacttgatcgacttccatatcaaccacaagaatgtggcaacgattttgacagccgaagcagctaatccatttggctatggtcggattgtccgtaatgacaatgcggaagtgcttcgcatcgtcgagcaaaaagatgcgacagattttgaaaaacaaatcaaagaaatcaatacagggacttatgtctttgacaatgcccgcctctttgaagctttgaagaatatcaataccaacaatgcccaaggtgaatactatatcacagatgtgattgggatcttccgagaagcaggagagaaagttggagcctatacgctcaaagattttgatgaaagtctcggggttaacgaccgcgttgcccttgcgacagcagaaggcatcatgcgtcgtcgcattaaccaagcccacatggtcaatggagtgagctttgtcaatccagatgcagcctatatcgatgtcgatgttgagatcgcaccagaagtgcaaatcgaagccaatgttaccctaaaagggcacacaaaaattggggctgaaaccgtcttaactaatggaacctatattgtggacagtgaaattggtgcaggtgccgttattactaactctatgattgaagagagcacggtagccgatggtgtgacagtgggaccttacgcccacattcgtccaggatctagcttggccaaagatgtccatatcggaaacttcgtcgaagtcaaaggttcgtctatcggagaaaataccaaagcaggtcatttgacttacattggcaactgccaagttggtagcaacgtcaactttggtgcaggaaccatcacggtgaattatgatggccaacacaagtttaaaacgacaattggaaacaatgtctttgttggctcaaattcgaccatcattgcaccagttgaattgggcgacaattccttagtcggtgctggatctaccattaccaaggatgttccagctgacgcgattgcgattggtcgtggtcgtcaagtgaataaagaagagtatgcccttcgcttgccacaccatcctaaaaataaataggagattctcatgcaatttgaagaaaaaaccattgagcgcaaggagatttatcagggaccgattttccaagtggtcactgatcaagtagaactacccgctggaaaaggccaagcgcagcgtgatttaatcttccataacggagcagtagcggttttgccgatcacagaagatgggaaaacgatcttggtcaagcagtaccgcaaggcgattgaacggacctcggtggagattccagcagggaagttagaaaagggagaaaatgcagaccctaaagcggctgctctgcgcgaattggaagaagaaattggctacacagcggatctagagttgttgtatgatttttattcagccattggattttgtaatgagcggatcaaactttatggtgcgaccaacttgaaaaaggtggaaaatccacgtccacaagatgcggatgagaccttagagttattagaagtgaccttgaaggaagcgaaagatttgatccaaactggcgaaatctgtgatgccaaaaccatcatggccatccaatattgggacttaatcaataaatagaggaggatccgatgggaaaacctttattaaccgatgaaatgattgaacgagcaaggcgaggtgaggacatcaccggtcctaatatggtcgatgctgaagaaacgaagattattcggacagaccacagaggatttggctacgaacgtcctatgagagagagtcgtatggagcgtccacaggagagctattctcaggatactgtgcagatccaagtggagcccacagtgaccaagagtcgtcgcattgaagaacgcaaacaaagtgtggtccaatccaaactcaataagattttgttctggatcattgtgctcctcattgccttgatcattgctatttggcgtctatagggtcgtcacaaggagagaaatgacatgaaaattggaattatcgcagccatgccccaggagttgaagatcttggttgaagcccttgaaaatggggaaaagcatctgcgtcttggaaaagtctactatacaggatcaattggacgtcatgaggtcgttttggtggaaagtggtatcggaaaagtcatgtctgctatgagtgtagcagtcttggccaatgatttcaaagtggaagccattatcaacacgggttctgcaggtgccgttgccccagggatggctgttggagatatcgtccttgcggacaaattggcctatcatgatgtggatgtgacagcctttggctataagtatggtcaaatggcaggccaaccgctttactttgaatctagtcgctatttcgtatcagaaatgaaaaaagttctggaagaagaagctgcaaccacacatgtgggcttgattacaacaggagatagctttatcgcgagtgaagaaaaagtcgcagcaattcgagagcatttcccagaagtattggcagtagagatggaaggggcagccgttgcccaagctgctcatgcagctggacgacccttcatggtcattcgagctatgagtgatacggcagatcacgcagccaatatttcttttgatgaatttatcgtagaggctggcgaacgctctgctcaaaccctgattaccttcttgaagagattggtgtagaaaaaatatagggagatggaccatgtatcgtgaatcgtattttgatggaggcctattttcatatattggccatgttttattagcaaccttcattacagtattgacttttgggatttgtgctccttggggcgtgtgcattatgtataactggaaggtcaagcataccgtgattgatggtcgtcgtcagtactttgacggcacggctatgcagttatttggaaattggatcaaatggtggttctttaccatcattacatttgggatctatgtgttctggttaaatatcaaggtcactcaatggattaccaagcatactcattttatagactaattgaaaaggactcgtctacggactagtccttttttgaagccgaatctttcagaaatagggaactttcatgctataataaagactagtaatgtaaaggagagaatatggttttatcaaagaaacgggcacgtcatgtgattgaagaaattatcgccctcttcccagatgctaagccaagtctggattttcgtaatcattttgaattgttagtagcggttatgctctcagctcagacgacagacgcggctgttaacaaagcgacaccaggtttgtttgcggcttttccaaccccgcaagccatggcagcagccagtgaatccgatatcgccaagcatatttctaaattaggcctctatcgaaataaggccaaatttctaaaaaaatgtgcccaacaattgctggataactttgatgggcaagtacctcagactcgtgaagagttagaaagtctagcaggagtaggacgcaagactgcaaatgtggtcatgagtgtaggatttggcattccagcttttgctgtcgatacccatgtggagcgaatctgcaagcaccatgatatcgtcaagaaatcagcaacaccattggaagttgaaaagcgggtcatggatgttctgccaaagagcgaatggctggctgcccatcaagccatgatttactttggacgggctatctgccatcctaaaaatcctgaatgtgaccagtacccacaactctatcattttgattaggaatcagttcctctgctcgaaagagcagaggttcttttttaggctaaacgtatatttattaaaaggattgaaagattcggttttgcaaatctgtggtggtaggtgcctagactcgcctatccggcttctttgagatcgatttcaagatgctttttctttatatcttattatattcattcagaaataacgaacttttttaaaataaatttggttttttgtaagaaatagtgtataatggtagaaaatctaacataaggagatagtgatgaaagcaaaaaaactgttagctcttgcaggagtttctgttgcaggtgcctttctcttagcagcatgtggcggtggtagtagcaatcaagcaacctactcattcgtctattcagcggatccaaataccttggattacatcgctgcaactcgtacaacgacttcagatgtcacaagtaaccttgtagatggtcttcttgaaaacgaccgatacggaaactttgtgccaagtctagcagaagattggactgtctctgaagatggattaacctatacttacaaacttcgtaaggatgccaaatggtatacgagtgaaggagaagaatatggtgctgtaacggctcaagactttgttacagggatcaaacacgcggttgagtctaaatcagaaggtctcttcttgattcaaaattcgatcaaaggtttggatgcctacgtaaaaggggaaaccaaagactttaacacagttggagtcaaagccttagacgaccacaccatccaatatactttggttcgtccagaaagcttctggaactcaaaaacaacctcaggtgttcttttcccagtcaatgcggatttcttgaaatctcaagggaaagattttggttcgttgaaacctagcagcatcttatacaatggtccattctacttgaaatcattgacttcaaaatctgagattgaattggtcaagaacaaagactattacgatgcgaaaaatgttcatatcgatcatgtcaaattgacctttaacgatggatcaaacccagattctatcattaaaaactttgaaaaaggtcaatattcctttgcatctgttatgccaaacagttcgacgtataagagcgttaagaaaaactttggcgacaacattgtctacggtttgcaattaggaacatcctactatcttggattcaacttggaccgtcaaaagtatgaccacactgccaaaactacggatgaacaaaaagcttctaccaagaaagcaatcctgaacaaggacttccgtcaagcggtgaactttggttttgaccgcaaatcatatgcggcacaagtatctggatctgatgcggctgaaaatacccttcgtagcactttggtgccaccaacttatgtccaagtcaatggagaagattttggtaaggtcgttgaaaaacaattggttacctatggggatcaatggaagggtgtgagcctggccgatggtcaaacgagcctttacagcccagaaaaagccaaggcttcatttgcgaaagctaaagctgaattgcaaaaacaaggcgttcaattcccaattcatttggactacattgtcagccaagtggacaacagcatggtccaacaagctagctccttcaaacaatctgtagagtcagcgcttggtgcagacaatgtcgttgtagaccttcaaaaggtttcggatgatgatttccaaaatatcacctacttcagcgatactgctgctgcgagagattacgatatctcaggcggtggttgggctcctgactaccaagacccatcgacttacctcgaaagtatcagcccagtaaatggttctgtcttctactatcttggtattgatgcaggttcaaacaatccagccattgcaacagttggtttggatcaatacgctaacatgttgaaagacgccgatgctgaattgttggatcaagctaaacgctatgaaaaatatgcagcagcgcaagcttggttgacagatagctcgattacgcttccaactgtctcaaatggtggtgctccaatgcttcaacggaccgtgccatacagccgtgctgcttcatgggtaggtactaaaggaacaggaacattctacaaataccttgaaatgtctaaagatgttgtcacaacaaaagactttaacaaggccaaagaagaatggttgaagaaaaaagcagaatccaataaaaaagctcaagaagatctcaaagatcacattgagaagaaaaaataaaaaaatcaatcattggtctatcaatgaggataaaaaaagtcgaggctgggacaaaagtcctagcctctcaattgtttctggattgtcgagcaagacgcagtggttgagtggtctctactacgctgatttcatcagcttttacagccctactcaactgtgcggaggtgggacgctccagtcttctatcaactatttgaaagctggaaatctaggggatgtcctaaccatcaggggggaatgtgtccatcaaggtcgtacaacctgtgtcgtcgatgtagatatcaccaaccaagatggccgaaatgtctgcaaggcaaccttcaccatgtttgtcacaggccaacgatctgaagatagacaggtgaggatataaaagaaagaatgagtagatagttacatcccaaaaatcccgagtgtgatcactatccgcaactctataactttaaagacatttgaaaagcgaggtctgatgacttcgcttttatttgatagggaagaaagtaagtaagagccaagaaaacaacagagcaatagcgccaattccaaggctaaatagaacaggaaggataatattttggtaaggagccttgcccctttcctcggcttcttcaatctcgctcaggctgcgtccttgatcataggcgacaatctggcgaaaggtacgaagattatgatgtttcttaaatttctcaatgcgtagggcgtagaacattgtgatagcataaatcaagcaactaatagcgataccgaaccattccagataaagtattagaggaatcattattataggacttccaattagtaaaatggtaaaaaccactccatctttttgatagctcataaattcttggtcgtgaataatttgtttcatggtttctaaatctcctttgactagtttgtccaatgacacttcaaagaccttgctcagtaaaagcaggttttgaatatcagggtaggttgctccgcgttcccagttggaaatggattgacggctgacaaagatgatttcagccaaatcatcttgagataaatttttctctttacgatagtgctggatctgctttccgacttgcataagatttcctcgctttctgatttcattctacctaattatacaaaaaatggctatcaaagttctttgacatgctgatttcatgggctttagcaaaggtttctgtcactggatttacaggtctgtcaatttatatttacttactgaaaaagaggccaacaacctcctttttcttattcactaaatcttaaaaaatagccatctggatctaaaactgcaaattcatgaggatagatataatggtcgccaacacgaaattctcttttggtcaaaggacgatgaatgggatagtcagcttccagcagtttttggtggagctgaggaacatcctcaatgccaaaggaaatattgacaccacgcccgaaaggataagtcagctgagctaattcttctgcgtcgccttcttctaacatgagttggcagtcttcaagggagaggaagagaaatttttcctcggggcgttcgtattcgacagagaagcccagcaagtcgcagtagaagtagcgcgacttttcgatgttggataccacaaattcggggatgacagcttgatagtccattagctttctccttagagttcaatctccaagacaatcggtgtgtggtcttggcgtgggcctgattcgatcatatctgacttggtaaccttatctgctacacggttacttgtgagccagtagtcgattctccagccggtgttgttgatttttgaagtcttgctgcgttgtgcccaccaggtatagcgctctggtacatccccgtgaaggtgacggaaggtgtctgtaaatcctttggccaaaaggtttgtaaatccttcacgttcttcgtctgtgaatcctggtgaacggcggttgctggctgggttggcaaggtcaatttccttgtgggcaacgttgtagtccccagttgcaaggacggttttttctttgtctaattcagccaaatattcagcatacttaacgtcccaaatttgacgttcttccaaacgtttgagtccatcaccagcgttaggtgtgtagacctgagtcacgaaaaattcatcaaattccaaagtaatgatccgaccttccaagtccatggtcgaaggagctccgatttctgggaaagtcacaactggtgtgagctcttttttatagaggaacatggttccagcgtagcctttacgagccggttcttgagaagagcgccaggtgttttcgtagccagggaagagctcctcaaggatttcgaggtgttttttagtaggacctttggcggataacttggtttcttgaatggcaatgatatctgcatcctcagaaaccaaggtttggaggacttcttgagagagtttggcgcgtgctgaatcactagttaatgcagcattaagcgagtcgatattccatgaaatgagtttcattgtatttccttttcttgacatgatagataattttattataacaaaaaatatatttttttctgattagaatgccttgaattctcccctgaaatacattataatagcttgaattcatttggagaaagggagttcattatgaaattttactcttatgactatgtattgagtcagatcagtcagcaaaactgggtgaccattgggatatctggcttgcttgttcttctgactggtttttttgcggtgaaagcctatcgggagaagcacgatagcaaattccgtgaattatccattatctcgattttgactctggttgcagtggtcttgatcggcatcagcagtttccaaaatagccaaagtaataatgaccaatttcaacgttctctgcattttattgaggtcatctcaaaggagttggatgtcaaaaaagaagacgtctatgtcaatacttcagcagccacagatggggcgatcctgaaggttggagaggtttattaccgagctatcgcaggatctgacccagatagctacctattagaaaagatggatctgtataaaacagacgtggaacttgtggaggtgaacaaatgatagtaaattttttaaacatcttgattaaattagctttgggcttgatttccttggtatttgtcatcaatgtgaccgggaaaggaaacttagcaccaaattctgcagtagaccagatacagaactttgttcttgggggcattattggtggggtcatctacaatagctccattaccattcttcaatacattgtgattctcttaatgtggactattttgatcttgctcttaaaatggctcaataccaatgttcgttttatgaagcacttgattgatggaaaaccaactgtcatcattaaaaatgggaaactggatccggaagcgtgtcgttccaaaggactttctgcttcagatgttgccttgaaactacgtggacaagggatttttcaattaaaagatgtgaagcgcgctgttattgaacaaaatggtcaattaattgttgtccgtgcgggggatgaaaatcctaaatacccgattattacggatggagtgattcaacttgaaattttggaaacaattgggaaaagcgaagagtggttgctggctgaattggaaaaagaaggctatgacaacgttctggatattttcattgccgagtatgataaaggaaagatcaatgttgtgacctattaagaagaagagattgggcgatcctgtccaatcttttttctttgtaaaatttcaggaaagacctcttcattttcttgagatactcttgaaaaaatagtaaaatgaaaggaaagtgtttattagaaaagaaggatagaaaatttcatgaagaaaaaaatacggaagtttgagaatcattcgattacacgcagactctacctgctgtttagtttgatttgccttctttttttggttctgattacccgacttggctatatgcagatctctcaccaagcctactatacggataaattggcaaaagctaccaaaaagacggtcaaacaagggagtgtgcgagggcaaatttatgatgcttctggtaagcccttggtggaaaatgtgggaaaacaagtcttgacctttactcgggatcgtaaaatgacggcccaagaaatgcgagagacagctggaaaactcttgcagtatgtcgatgtagaaaatcctcaagtaaccgaacggcaagaagtggattactatctagccaataccaaagtataccaagaggtcgtagagcacctgcctgagaaaaagaaatttgataccgatggcaatcgtctaccagaagctaaaatctatcaagcagcagcggacagcattgacccttcaaaactcggttacacggatgatgagaaaaagattatctatctttatagccagatgaatgctgtggagaattttgcgacggggattatttcgacgcaagcactaggagctgagcagattgcgaccatcgcggctgacagtcaggaccttcctggaattgcgatcacgaccagctgggaccgcaaggttttggatactcctttagcttctatcatcggaacggtttcgactgagcaggcaggacttccagcagaagaagtcgaggactatgtcaaaaaaggttatgccctcaatgaccgggttggaacctcttatctcgaaaaggaatacgaaaacgtccttcaaggaaaacgcagtgaaaaagaaattctcctggataaaaatggcaatatggataaagtggtagacatttcaaaaggagctaagggggaaaacctcaagctctcgattgacttggatttccaaaaaggggtggaagatattctccgctctgcctttagcgcagagttgcaagctggaaatgcgacctactccgaaggtgtctatgctgtagcccttgagcctgatacagggaaagtccttgccatggcagggatcaaacaccaggctggtagtcaagatttatcaaccgatgctttgggaacagtcaccaatgttttcgtcccaggatcggtcgttaaaggagcaaccttgacttcaggatgggaaaatggtgccatttccggcaatcaagtactgaccgatcagcccattgtttttgcaggatcaacgccgattaactcttggtttacccaatatggcagtcgctccatcaatgcagtagaagctttggaatattcttccaatacctacatggttcaaattgctcttaagatgatggggcaaccctacactccaaatatgaccttacaagtagatcaagtggaccctgctatgaaaaaactccgttctacttttgcagagtacggtcttggaacgtcaacggggattgaccttcccaatgaatcgaccggttttatcccgaaagagtatacagtcggtaattatttgaccaatgcctttggccagtttgacaactacacccctatgcaattggctcagtatgcggcaaccgttgcaaatgatgggaagcgggtgagtcctcatgtcgtcgaaggcatctatgacaataatgatcaaggtggcctcggtcagttgaaaaaagcgatcgaagccaaggagctcaatcaagtccatatctcagcggagaacatggctttgatcaagcaagggttttaccaagtggccaatggtacgagtgggttgacgacaggaaaaaccgttggtcgtggggccagtgtgcccatcagtgcaaagactggtacagctgaaaccactgtcgatgggggcaaacaagccattaatactaatgtggtggcgtatgcaccatcgaataatccaaagattgcggtagcggtggtctttccacataataccaatctacaggcgacagttagtcattccattacgcgtgacattattaacttatacaatcagaaacaccccatgaattagaaaggaaactatgctttatccagcacctattgcaaaattaattgacagctattccaagttgccaggaattgggatcaaaacagcgacccgtcttgctttttacactattggcatgtcagatgatgatgttaatgaatttgccaagaacttactaaatgccaagcgtgagctagggtattgcagtatttgtggcaatttaaccgatgaagaaacctgcgagatttgtcgagatgaaacgcgggatccttccctcattcttgttgtagaagatagccgggatgtctctgctatggaaaatatccaggaataccacggccgctaccatgtcttgcatggcttgatctcacccatgaatggcgtgggacccgatgatatcaatctcaagagtttgctcagccgcttgatggatggaacagttactgaggtcattgttgcgaccaatgcgacggcagacggggaagcgacatctatgtatatctcacgcgtcctcaaacctgcaggcatcaaagtgacccgtttggcacggggtctagcagttggagccgatatcgagtatgcggacgaagtgacccttcttcgcgcgatcgaaaatcggacagaattataagagaagttctttcgaaagggctgtcattgtggtatactatcaagtaagaaatcaagggaacaattagggagaaactatgagtaaacaagacttaatcctgttatatggtggacgtagtgcagaacgtgaagtatctgttctttcagcagaaagcgtgatgcgcgcgattgattaccaagcattttcggttcagacctattttattacgcagtcaggagacttcatccagacgcaagcttttgaagagaaaccagcggatgatgagaaattgatgaccaatgagacagtggactggtctaaaaaagtcgcaccatcagcgatttacaaggaaggagcagtggtctttccagtgcttcatggaccaatgggtgaagatggttctattcaaggcttcttagaagtcttgaaaatgccttatgtcggctgtggcatcctggcttctagtgtcgcaatggacaagatcaccaccaagcgggttttggaatctgcagggattccacaagttccatatgtagctgtagtagaaggcgatgatatagatgagaaaattgctgcaattgaagcgactctctcttatccagtctttaccaaaccatccaatatgggatctagtgttgggatttcaaaatctgaaaaccaaactgaacttcggactgctcttgaattggccttcaagtacgatagccgtgtcttggtagaacaaggggtcaatgcgcgtgagatcgaagttgggctccttggaaactatgatgtgaaaagtaccttgccaggtgaagttgtcaaagatgttgccttctatgattatgatgccaaatacatcgataacaaaattaccatggcgattccagctcaattggaccctgaggttgtgaaaatcatgcgaaccaacgcagaaaaagcctttcgtgcgatcggtggtctaggcttagctcgttgtgatttcttctatactgataaaggagagatcttcttaaatgagctcaataccatgccaggctttacccaatggtctatgtatcccttgctttgggacaatatgggtctcaactatacagatttgatcaccaagttagtagagcttggaaaagaagttttccaaaaacacgaagcgcatttgttgtaagaaaagagagagtgggacagaaatcggtaattcgttagaattcgatttcgtggtcccacctccgcacagttgagtaggcctgtaaaagctgatgaaatcagcgtagtagagcccactcaaccactgcgtcttgctcgacaatccaaaaataattgagaggctaggacttctgtcccagccactttttttgtggtctagaatatggtataatgagaagaatttgaaacgagcgtctagacttttggggacgacgctacggagaactgaggagtcggatatgaatctcacattacatgaagttgctcatctagtacatgcaaaaaatgatatcagccaatttgaagatgtggcccttgtcaaacctgaatttgacagccgtttgattgggccgggagacctttttgttccgttaaagggagcgcgtgatggtcatgatttcatcgagaccgcttttgaaaatggagccgtagccactttttcagagaaagtgattgaaggccacccttatattttggtggaagatgttttgagcgcatttcaaacattggctgcagcctatcttcaaaagacaaaagtggatgtttttgctgtgacagggtcaaatggtaaaaccaccacaaaagatatgttggcacagcttttgtccaccacctacctgacctataaaacacaaggaaactataataacgaaattggtcttccttatacggttttgcatatgccagaagggacggacaaactggtccttgaaatggggcaagaccatctaggagatatccatctcttgtcagaactggcgcatccaaaagctgctattgtcaccttgattggggaagcccatttggaattcttcaaagatcgaagtgagatcgcaaaaggaaaactccagattgcggatgggatgccagaaggcggtcttctggtagttccagctgatccgatcgtcaatgcctacctccctgaaaaacaaaaagtggtccgctttggtccagacgaggagatttttattaccgagttagtcgagcgaaaggacagcctaaccttccgagcgaatttcttagaagaagcgattgatcttccggtaacaggaaaatacaatgcgaccaatgctatgatcgcagcttatgttgccctgcaagaaggagtgagtgaggctgcgattcgtgatagttttgaaaccttgcaattaacacgcaaccggacagaatggaagaaagcaggtaatggggcggatatcctatccgatgtctacaatgctaacccaacggctatgcgcctaatcttagaaactttctcgactattcctgctaatccaaatggtcgaaaattagccgtcctggcagatatgaaagaactaggggagcaatctattgatctgcacaaccaaatgattctcagcctctcgccagatgttttggatacggttattttttatggccaagacattgcgggattggctcagttagcgagtcagatgttcccactcggacatgtctattatttcaagaagacagctgaggaagatcagtttgaggacatggtcaaacaagtcaaggaaagcttgaaagagcaagaccaaatccttatcaagggaagcaattctatgaatctagccaaattagtagaggaattggagaatggtaagtaataatgtactgaaggacattcagcgcttgatttcaatcaccaatacaggcttagccttctcaaaagatccatttgatcaagagcgctaccaggatattcgtgctattttacaggatcttgtgagagaaacgactgatctgaattcacaagaattatcggatttgtttcgaccgacaaactattatgacacccccttaattgatgttaggacttggattgtcaaagatagaaaactttgtctggtgaaaggtcagggagaagagacctgggctttgccaggtggttttggtgaggttggctattctcctaaagaaaatattttaaaggaaatccaagaagaaacgggctatgtagcacgtgtcaatcggttgttggcagtatttgataccaatcgctaccaattgcaaagtcgccaatatgtgaaattggtatttgaatgtgaattgctggatggaagttttcaacagaatcaggaaatttccgatcttgcattttttgagagagagaaaatgcctgctctttctaccaagcgcaatacagaagaacaattgaatttcctttgggaggtttatgatgggaaacgagatttgtattgtgattaaaaacgatctataaattaaagggatataaaaatgacactttgggatttattgtttacgaaccaaaaatcagccccgcctgagtttgggctatggtatttcattctgccagcttctttgttggtggttggctacttttccatcaaatatgcgcagtcaaaaagctaccaacgcttttggtattgggcacaattgattcaagtcttaaccatcaatgcttggtatattctagcccacatgcctttgacagacaatttacctttttatcattgtcgcttggctatgcttgcgatcctctttgctcctagagggacctatatcaagcaatattttgccttgttgggtgttctaggatccattgcggctttggtttatccggcctttgaccccttcccattcccccatattactgtactcaatctgatttttagtcactgggccttgtttgccaatagtttgatttacctacaggatttttatcagtcggaaaaacaggacactttacgaattgttaagatcacctttggtatgaatgcagtcatctttttggtcaatcttttgaccagaggagattacggcttcttacgacgtccaccaatcattggagaccacggtgctcttttgaactacctcttggtcagcatcgtgatggtggctggtatttgcttggtcaaccagcgctacaaatacaagatggttgaagagactgtcgtttcgcgttcggaatagaaaaaagagtagatgagggaaagaaatcatggcactttgggacttatttttcactagtcaaccaacatcccctcctcaattgggtgtctggtatttcttattgccgacttctttggtagtggtgggagttctgtccgttcgatttgctcactctaaaggctatcaaaacttttggtattgggggcaattgattcagttgctcattatcaactcttggtatctagcagctcgcttgcctttttcagagagtcttcccttctatcatagccggatggccatgtggattatccttttggcccccaagggaagcttcaagcaatattttgccttagtcggagtctttggctccattatggccttggttcatcctgttttttatccctacccttttcctcacgtttcctcgatcaacaatgtctttggtcactgggccctcttggccaactgtttgatctatcttgttcaatcctaccaggtggaagagggggctgtttggaaaatctgtcagatgacgtttggggtcaatgccattattcagcttgcgaatctcgcaacgggcggaaactacggctttatgcgtcgcccacctgtgatcggtgaccatggccttgtgttcaactatttgatcgtgacagttctcatgacggggacactgattttcatcaatacgatcgttcagtacagtaagaaaagaagaatacctaaatctgtttaaataaggagattttatgcatcattttttcactacagaatcaacagcaccaccagcaatctcagcactttggtatagtgtgatggtcttgttcgttgtgacagcgattatgatgtcacttcgctattatcagaatgagcaatttcgtaaatgctttcaatacttacaaggcttccagttaatttgcttgtatctttggtattttgcctaccacattccttggtccaatagcttaccattttatcattgccgcttggccatgtttgcggtcttgtttttaccagaccgctggaaaagtaaacagttctttgccttgatgggagtgagtggagccatctttgccttgggctatccagtctttgatccctatactttccctcatattacaagtttttctttcctcctcggacattactgtctcctcatcaattccttgatttatctcttgagatggtatgatcgaaacctcttaaaaaatagtcagattgttctctatacctttgccttagatttattcctggttggagtcaatcaattgacgggaggaaattacggcttgatggcccgccctccgattatgagaggggataaggtgtggctcaattatctggttgtatccagtattttagcccttgctttattactctttaatcagttcttccgtcgcagaagtgagcgggtgaaagtgagaaaataacaagtaggaaggttgggacatctcggtctcaaccctgttttatattaaaggagaatatatgaagcgtttcttgctaatgatttccctcatttggagtttagtttgtacaatcacgatcgcacatgcagatgatgaagttcgctattcaattgaatcctatgtaggacacctccaattgcaggaagacagccaagcaacatttacacaagagattacctatcagtttcagacaggctatcatggtcaatatgtgactctaggaagcgcaaatcctcttccaaaagggtttaaaattcatcgtcatcctgaggtggaagcctatgtggatggggaaaaacgtgagattcgtgtagaggagacagacctggaagatggtcggcaattaaaaatatacaatgcccgtatcgtcggagggacggtcaagatcaaagtaaaatggaagattgatcatctcttgactttctacaaggatattgcagaactgaattggtttcctatttcagatggagatgagaaagtcgcgaaattagatttttatgtggatggcttgaatgccaagcagggaaaactgtatgcccatactggttactttaatccaccagcccaagtcgaacggactgcaactggttatcatatttggacaaaggattttccaaaaaatggcaagctcgaactgcatgcctattggccaatgacagaggtcctgcgtcgagaccaagcaaatgagattaaccagggaaatggaaaagagaaatttctcaataaagaaaaatccattgaacaaaaaacattcttttatcggacccttctactcaaggtcgttccaattgtatcggttcttttatttatcctagctttcattccatggattcggtattttattagtaccagaactcgtcggattgcaaaaggagtacgattatacgaaccaccacagaatttacctcctcttgtcctagctaaggcactgtatcaacttgattttgaacggatggtgatgtctagagagaaggggcaactaaaatttaatcatctcatccaggcaaccgtgttagatcttattgatcgaggaaatcttcggttgactagggatgaaaatggggaaaccttgacctgtctccattatgaaggcttggctgattttgaattaaagtttattgaaatgatttttgatcaagaatctgaaatcaatatcagtgaggtattctcaaagtataaaattgataaagtagccctaaaaaaagactttcgagctgctaaatcagacacgcaacgagaccgtattcgaaagatcggaaatgaagttcaatcccttttaaaaaaggatgcccagcaattgtcaaaaggtgtcgataaggagattgcgaaattaggattgccttcttattttagagacttatctgagaaagaagaagctctttcaaaaacaggctgtgccttacatttttggctcttactgatcttatttgtgagcatgtgtttcttatcttttggattcggttcacacctatcttccttctatttttggatgattgtattgttggtcgtcttcttcattccattttatattcttgtgaaaattcgcgaagatcatctacaatccttagagaacttggattcacaattccaatggatggcctttcgaaatatgatcgaaagtattccaaatttcaaccaagcagaacttgagagtgtcatcctatggaatcgtatcttagtctatgcaaccatgtatggtcaagctaaaaaagtgagtcaggtactcaaaaatcatcagatttccttaccatatgagaattgggatgctgttgtttggataacgacctcttcaaattccttcctagacggctctaccttgatgagttatgcagatgattcctatagcgtttcaagcttctctactaactcctcagatggcagtggcggttttgacggcggtggcttttctgatggtggcggtggcggaggatttggagccttctaacagtcatgataagaggactagaatctacggattttagtctttctttttgctctcaaagaagaatcatcgttgaaaaaagtgcctattttcgctataataggacagatagagaaattgaggagaaatccgatgtagagatgaatttgtaaatttatcaaaaaataagaagagaaagaattaggaacatgaacgtacaagaagaaattaaaaaacgccgtacctttgccatcatctcccacccggatgctggtaaaacgacgattactgagcagttgctctactttggtggggagattcgggaagccggtactgtcaaagggaagaaaacaggaaactttgctaaatccgactggatggatatcgagaaacaacgtgggatttcggtaacctcatctgtcatgcagtttgactacgatggaaaacgcgttaatatccttgataccccagggcacgaggacttctcagaagatacttaccggaccttgatggcggtggatgcggcggttatggtcgtagactctgctaaagggatcgaggctcaaaccaagaaattgtttgaggttgtgaaacaccgtggcattccagtctttacctttatgaacaagctggaccgtgatggacgtgagccattggacctcttgcaagaattggaagaagtcttgggcatcgcaagttacccaatgaactggccgatcgggatggggaaagcctttgaggggctttacgacctctataatcaacgcttggaactctacaaaggggatgaacgttttgccagtctagaagatggagacaagctctttgccaacaatccattctacgagcaggtgaaagacgatatcgaacttttgcaagaagctggaaatgaattctcagaagaagccatccttgcgggtgaattaactccagttttctttggttcggctcttactaactttggggtgcagactttcttggaaaccttcctcaagtttgctccagaaccacacggccacaagaagaccgatggagaaatggtcgatccttatgacaaggatttctcaggctttgtctttaaaatccaagccaacatggaccctcgtcaccgtgaccggattgcctttgtgcggatcgtatcgggtgaatttgagcgtgggatgagtgtcaacctgcctcgtactggtaagggcgctaagctatcaaatgtcacccagtttatggccgaaagccgtgagaatgtcagcaatgccgtagcaggagacatcatcggggtctacgatacagggacttatcaggttggggatacgctgacagttggtaaaaacaagttcgaatttgaaccactgccaacctttacccctgaaattttcatgaaggtgtctgccaagaacgttatgaagcaaaaatccttccacaaagggattgagcaattggtgcaagaaggagctatccagctctataccaactaccaaacaggtgaatacatgttaggtgcggttgggcaactccagtttgaagtctttaagcaccggatggaaaatgaatacaatgccgaagtggtcatgagcccaatgggtaaaaagaccgttcgctggatcaaaccagaagacttggatgagcgcatgtcttcaagccgaaatatcttggctaaggaccgctttgaccagccagtcttcctctttgaaaatgactttgccctccgctggtttgcggacaagtatccagacgttgagttggaagaaaagatgggataaggaacgttttcaaaaccgatccataacaatagaaataagaaaacggaagcttatccgttttcgcttttaaaggagaaatgatgggattattaagtggtttgatgggcaatgcctctcaaaaaaatgttgacaaagtagaaagagatctggaagatattttggtgccgggagagcaagtcactctcgcttttagcctgattcgtgatttgatcgtctttaccgaatttcgtttgatcttggtggataagcaaggagtaacaggaaagaagacatcctacaaatcccttccttatcgctcgatctctcgattttcagtcgaaacttccggtcattttgatttggatgccgaattaaaaatctgggtctcttctgcagtcgagccttcagaagttttacaattcaagagtgacagcagcgtcattgaaatccagcaagcattagccagtgcagtttttaaataaaaatatcattttgatagagaacagttgagaaaggagacggaatgtttatcgaaaaacaattgggtcaagatcggaaatggatcaatatcgactcggatatgattgctgaaaactcatatctttataaaaaatacgagattgacaaagaaaccattgagtacgcgatggataagaacgaacgtgcccatatggattataatcgagaaaacggtacgatcacatttatctacaatgtattggatttagaaaaggacaaggaatactacgaaaccatccctatgacctttatcgttcaagatacgcgactcgtgaccatcagtaaccaggacaatgcctatatcattgaacaaatggttcgctatttggaaagccatggggagttgtcgatctataagttgctttttgcaggtcttgaaatgatcagtaatgcttattatccgattattgatcgcttagataagcacaaggatgaactcaatcgtttgcttcgaaagacaacgacgaccaagaatctttatgccctgtctgaccttgagaccggtatggtctatctggtcgcagcagccaagcaaaatcggatgttgctagaacatattaaagcgcatgccatttatcgcaggatgaatgatgttgaaaaagagcagtttgatgatgccatgatcgaagcgcgtcagttggcttcgatgactgagttgatttccaatgtcttgcaacagttgtcaggatcttacaacaatatcctaaacaacaacttgaatgacaacttgacaaccctaaccatctttgaagccttgttggcggttttagccgttatcaccggtttcttcggaatgaatatccctcttcctatgacaaaggatcccaatgcttggatttatgtatccgtatgtagctttatattatggctcattttgggaaaggttatgcggtggattgtgaaacaaagataaaaaagaggcttggagaaatccgagcctcttcgtatctagaataatctgagaaataggaaccatctagacacctgccctcctctccaaagaaggggcagtgtgaatagttcatcgactgtacaaaatcttcttggaaatagtaggagtagatttaatagtactgagtggttctaaataaatcagaacttagaataaatcgttgaatcagataaaatgatcctatttctttatacagaaatattttagatactaactgtattatacatatttatttgtaaaaacgcaagaactaccaaaaaaagtttttccgaagtttttatactcctatgatgaagtatatgaaatggttacaagaagaaaaccagtcctggcaaggtttaggggcgtttttataatcttaagctatctaagattttttcctaaaaaataaaattagtctcctgtgactatcatttacctcttcattgtgttatactagataagttgcaaacttgtatgagagaaatgctggggagatggaacaattagaaaaggaatgttggtcaatctcccacaaggaggatcttggtgtcttttcgtttggaaaacgactttaatcaaccatatccgctagtgcgaaaacatttttcgcagaagggaattccataaaaaaacgattgggtttttctttagatgagtcttgcgacaggtaaccgggaaggagacttcctatgcaatcagtgcgttttcgcattgaaagaagtgtgataaagtggcttcgcaccactttttagaaagaagaaagaattgaaattcaacgaatttaacttatctgctgaattattagcagaaatcgaaaaagctggctttgtagaagcaagccccatccaagaacaaaccattcctttggcccttgaaggaatagatgtcattggtcaggcacaaacagggaccggtaaaacggctgcttttggtcttccaactttggagaagattgatgttgataacacagtaatccaagcccttgttattgccccgacacgtgagttggcggttcaaagtcaggaagaactcttccgttttggacgcagcaagggtgtcaaagtccgctctgtctatggtggatcaagcatcgaaaagcaaatcaaagccttgaagtcaggtgctcatatcgttgtgggaacccctggacgcttgctagatttgatcaagcgcaaggccttgaaactcgatcatattgaaaccttgatcttggatgaagcagatgaaatgctcaatatgggctttttggaagatatcgaagctatcattagccgtgttccagaaacacgtcaaactttgctcttttcagcaacgatgccagaagcgatcaaacgcattggtgttcagtttatgaaagaacccgaacacgttaagatcgcagccaaagaattgaccaccgacttggtcgatcaatactatattcgtgtcaaagagggcgaaaagtttgataccatgactcgattgatggatgtcgagcaaccggagcttgccattgtctttggtcggactaaacgccgggtcgatgaattgacgcgtggcttgaagatccgtggtttccgagcagaagggattcacggagatttggatcaaaacaaacgtcttcgtgtccttcgtgactttaaaaatgggaacttggacgtcttggtggcaacggacgttgcggcacgtggtttggacatttcaggtgtgacccatgtctacaactacgatattccacaagatccagaaagctatgttcaccggatcggacggacaggtcgtgctgggaaaacaggccaatccattacctttgtatcgccaaatgaaatgggctatttgcaaatcatagagaacttgactaaaaagcggatgaagggaatgaaacctgcaacagcagcagaagccttccaagcgaaaaaacaagtagcgctgaagaaaattgagcgagactttgaggatgaaaaaatccggactaactttgagaagtttggtaaggatgctcgcaaattggctgcagaattcactcctgaagaactggctatgtatatcttaagcttgaccgttcaagatccagatagtcttccagaagttgaaattgcgcgtgaaaaaccattgccatttaaaccatccggtggtggctttggtgggaaaggcaaagggggccgtggaaatggccgtcgtggagaccaacgccgtgaccgaaatcgcagagatgaccgtgaaggtggacgccgtgatttcaaacgcaagtccaataaaaatagccgagactttgaaggtaaaggcaacaaacgtcctcatcgtacttctaatgaaaagaaaaatggatttgtcatccgcaacaaaggggataaataagtcctaaagacggtctagcaataggccgtctttttaatgaaaatcaaaaatacaagggttaactagctgttaacccttgtatatttataaggagacctaaatgataactgactcttttagaaaaatgtatcatgataaggagcatcctaaaaaagtcagaaaacagaaagaacggattcctaaaacggaatgtttctgttaacatattaagtttacaattatttctaagctttgtcaaggtttttttcttatatttttaaaaatttttaacgaaaaagataaaaattgacaatcttagctaaaaggttataatgaatataataactatattaatcataaagaggtggcgtccatggtgattgcattaaaaaacgatgatctagaagtacaatgtaagacatttggaggggaattgagctccattcgtaataaagaaggcttagaatatctctggcaaggggatccggagtattggtcgggacaagcgcctgttttgtttccaatttgcggaagcgttcgtaatggccaagtacagtatcatctaaaagatggagtgaagacaggtcagctgccaagacacggtctcattaggaagagagagtttgaacttaaagaacaaacagaccatcgtcttgtctttgaaatcacctctaacgaagagagcctgcaaaattatccctaccattttcgagttgaaatcgtttatgaactacaagggaaagaaatcaccatcacctatcgtgtacaaaatctagagtctgatcaagtcatgccttatttcattggagggcatccagcttttcattgtccccttttagcagatgaagactatgaagactacgagttgatttttgaaaaagaagaaacctgcagcgtccctctcttgttcacagaaactggattggtcgatcgcctgcagcggacgccatttttcgatcataagcgtagcctacctttgcgacatgaactatttgaaaaagatgccattattttagatcagttaacctctaaatctgtgaagcttatctcgaaaaaatcaggtaaaggtttggaatttgattttgcagattttgaaaatctggtcctttggtctaccaataacaagggccccttcattgccttagagccttggacaggtatttccacatctgcagaagagggcgatttcttcgaagacaaaaaaggtgtgatccagttggaccctcaagagacacggagtcatcagtaccgtatcaccattttgtaaatgaaaaaccgttggactatggagtccgacggttctttttgatatagtttagttttgcctggcgcgatttctttttaaagagagcttcggcagacatcgcagagggtttatctggataggattctttgtaaagaagtttaacggggaggcgagcccgtgtgtatttggccccttttccagcattgtgagtcttcaggcgtttttcgacatccgtggtatagccagtgtagagagagccatccgcacactctaaaacatacatgtaagccttagtttccatagtagatctcatgaatctcgtctgtatagctgccatcttcattgtgaataaagagaggaggaagaatttttaaaccatccagtgagccatccttgatcgcctcaatcaataacatattcgcctctttggtcacttttggatagacaaactggatccgcttaggtgcaagattgtaacgcttcatggtttcgatgatatctaaaaagcgatctggacgatggaccatcgctaagcgaccatttgatttgagaacctgctgggccacatggcaaatctcatctaaattggtggtaatttcatgtcgggctaagaggtagtgttcactctcattgagattggaatgctcatccaccttgaaataaggaggattgcagaggataatatccaccttactgcccttgatatgttgaggcaaatgcttgaggtcatcggtgatcatggacatttgctggttcaagctattgagggcaatcgagcgggtagccatatctgctaaacgttcctgaatttcgacaccaatgatctgagcctctgttcgggtacttgcaaatagtcccacagctccatttccagcgcagagatccacgatcaatcctcgcttgggcaattttggaaaacgtgagagcaggacgctatccacggagtaactaaaaacttcccgattttgtatgatttttacatcacttgaaaagagttggttgacgcgctcgccgtcttttaattcgatatctgtcatggctctattatagcatgaaaagaggctcggggaaagatgataatttttgatatattaaaataatattttttgtaaaaacgctttcttttcttatttaaatatgttactatatattaaaaaagtgggaggttttgtaaatgaacaaaacgaaaaaatggttaggtttaggtttatccgtactttcagttagtgtactcgtagcttgtggaagctcaaattctcagtcaaataattcttcaaaagaaactaagacagagaaaatcgcaacaactgaaaaaagtagtgagaaaaaatcagcatatgctattggtgataaaattgtctttgataaacaagctgagtatacaattacaaaagttgaatggtctgatgaacgcaatgattttgaccaatcaaatcctgataaagtgttgaaagtaacttataatgttaaaaatctttccgataaggatttagctgtaggtgttgatatcaatctttttgtaggcggaaataaaatggaatcttatcctaatacgaatacaatggggtccatttcgccaggtcgatcaatggaaggtgcggtacaacattttggtgtaaaaggggatggcaaattagaacttgaaataaaaccatttactgcatttaatgaaaaacctgcgattgttgcttttgatgcaccgtaaaaaaagaggctgggacaaaagtcctagcctctcaattgtctttggattgtcgagaaagacgcagtggttgagtgggctctactacgctgatttcatcagcttttacagccctactaaactgtgcggaggtggggcgacgaaatcgaattctaacgaattaccgatttctgtcccactctcttttttaatcaaattcatatttttgtagaatcgttgtgaggataaagactcctgtaaagatggccatcaatgccagataaactgggaaagtagtggctgtaaggagtgaaatctcgatcaagtttttcaatacgaccgcagatgcgtagaatcctacaacagagaagagaatgaggagggctcgccagatatttagtggaaggcaggcacggatgacggataggaaaccgatggatccaagtaagtaataggatacagtagacatatcggctgcagaccaaccatggcttgctccccaaaggcgaatgaacaagacactaaagacgaccatcaaggcgcttggtaaggctaacagaagggaacgtcttaagaagtgtttttcaaccggtttgatattgcgttcaaaggtcaacacaaatggtgggaatccttcgacgaattggtcaatcaaggtgatttgaatagggatgaatggaaaaaccagcaaataattgacattgaagaaaagggcactggcgatacagataatagccaagaggaaggaatagatcgttttgatgaagaaaatcggagcgattcgtccaatgttattgaccacacgacgaccttcgaatagaatttctggaacatcattaaagtcagagttcaaaagaacgatattggcaatttgacgggttgcaggatctccttcagccattacgatggagcagtctgcttcacgaagagcgaggatatcattgaccccgtctccagtcatagctgtcgttcgaccagctgctttcaaggtttgaatgagcagtttcttttggtgaggggatacgcgtccaaagatggctgtttcctctgcttgatccactaattgatcatcagaaattttggaacaatcgatgtagttttcgtagtttttgaagcccgcttgttgagcgatataagagaccgtcacagggttgtcaccagagatgatcttaagatccacgccttcagagcgaagatactcgagggtatcagaagccccttcacgaatggggtctgtaatctcaataaccgcaattccttcaagattttcaggcagtttcaattcctgcatgctgatctgttctgaactgtgggctaagacgagaacgcgcgatccacggccttgtgcttcgacgacagcagttggattttcttgaaggagcatttcaggagcaccgagaaagacggtgccaagattggagaggtgcatggctccccatttccgatcacttgagaaaggaatgatgttttccgcagtataagcatgctccaactctccataagccttgcgaatagcttgagcagtaggattggtgtcctcgctatattgcatgtaagctgaaaggataactttgatggtttcctcagaaaaatgatcagataagctatggagagcttcaactgtcatcttcccttgagtgatggtaccggtcttatcaagacacaaggtatccacacgcgccagggtttctactgagtacatttcttggacaagaaccttgcgcataccgagcttaataaccgctgtcaaaagagacgtaactgtcagtaaggcaattccttttggcaacattcccaggagagctgtggaagaattcacgacagaatccttgattggcagcatcttgatcaacaatgcttcaaagaagagggcaaggccaaatgggatgataattttaccagtgaagctagaaattttcgctaagttataaagaatacgcgaattgataggcttcaaggttttagcttccatcatcagtttgttggcatagttgtttgctccaactcgcttgacacgggcatagacttgaccactggcaatataactaccagaaagcagttcatcgccaacttcttttaagaccagatcactctcaccagtcagcatagcctcattggcttcagcgataccagacatgacttcggcatcactagggatctgctcacctgaagacaagagcattaaatcacctagaacaagcttttctggtggaatcgcatctttttccccgtcacgaatgacagtcactagctcacgactcatgaggttgagcttatcaatcatccgcttggcgcgcatctcggtcatgatccctgtaatggcattgaagcaaatgactgcgaaaaagatcatattgctccaggcctgtacagcagccaaggccacagcaatcacaaagtttaaggtattaaacaaggtgaagacgttgcgcttgataatttgccaggtactggtacttgtattcgttgtaaaatcattggtttgtccgcgatccattttcttgcggacttcactgagggacaagccctttaaatcaatagtttccatagacaatatgatatcatttttttgagaaaaagactatctagaatcggtccgctgagacattttttatctaaaaaaggtttgcggtcaaaatcaggatacggtataataagaaagaaccttttacaggatggaatatcttgtagagagacgaatgaaatggatttgaggaacaactatgttttatacctatttacgtggccttgttgcctttattctttgggttttaaatgggaatgcccattaccatcataaggataatattccagatcaagaagagaactacatcttggtatcccctcaccggacttggtgggatccggtctatatggcctttgcgaccaagccaaagcagtttatctttatggcgaaaaaagagctcttcaccaatcgtatttttggctggtggattcgcatgtgtggggcttttccgatcgaccgtgaaaatccaggagcagaagccattaagtatcctgtcaatatgctgaaaaagagcaaccgttctttgattatgttcccaagtggaagccgtcattctcaagacgtcaaaggcggtgttgccatcattgccaaaatggcgaaggtccgtatcatgccagtgacttatactggtccaagagacttgaaagggttggcaacaggtgaacgcattgatatgaactttggacatcccattgatatctcggatattaaaaagatgaatgacgaaggagtggcagaggttgcttgccgtatccaagaggagtttgatcgcttggatgcggaagcacaagcaatcaacaccccaacaaaaccttttatcttgattcgtttgttaaaaatccttttgattccccttgtcttagtcgtgggcatcttgaccttgctctttagttacctagcaagctttgtatgggatccagacaaacatcggaaaaataagtaaaaaagctgagagtttttctcagtttttttttatttttacgaataataaaagtgagaggaggtttcttatggaggatatcatcgaaaaaatcaaagaatataagctctttttagctcttactgctatcggactcttacttggagggtattttctttttcatcgacctcagtcaagtgcatccaccataccggatctttatcagtcttctagttcaacttcgagcaaagaaaaggtgcagaccgctagttccaaagaagaaaagacggcgacttctgtgtctgatgcacctgagatcattacggtcgatgtcaaaggagccgtcaaacaaccaggtgtctatgagttgcgctctgatagcagagtccacgatgccattcataaggcgggtggaatgactgctgaagccaatagccaatcggtcaatttggcgcaaaaactctctgatgaagcagtgatttatgttgccaaagaaggggaggatgttccagcacttggaagttcagaaagtcctgcaacttcgtcagcatcagcagaaaaaacaggcaaggtccatttaaatcgagcgaccgagtcagagctccagacggtatcaggcattggtcagaaacgagcccaggacattatcgcctatcgcgacgcaaatggcccttttcgatcagtggatgatcttaaaaatgtttcaggaatcggggagaaaacactggagaaactaagagatgctttcacggtggattaaagagctccctttttcgcttgtacacctcgcttttttacttctttggttgtattttagtgtttatcaaccatcttggctttcgatcagcggtctagtagtggtgatatgtttagtggttcatcactataaggaggatcgctcaagtttgttgcgtcttgctttagcaactctttgttttgcgaccttctttgtttttcagagagcccaggatcatccaaaacaagtcgaaagtcgctccccagcccatttacatctgatcccagataccatcaaggttaatggagatgccctgtcttttcgtgctaaagatcagggtagtacctaccaagttttttacaccttgaaatctgagaaagaaaaacagcagtggcaaggtcaaactcacttgttggagttgacgtataagggtgtcatagaagagccagaagggcagcgaaattttagaggttttgactatcgagcttatttgaagactcagggaatatatcaccaaattagaattgaaacgatccaatctgcgcttcccatccaaacgtggaatgttttcgattggctatctcaatggaggcgccaagccattgtttggagcaaggagcactttccacagccaatgaaccagtatatgaccggccttctttttggttatttagatacggatttcgaggagatggatcagctttacacgagtttaggaattattcatttgtttgccttgtctgggatgcaggtcggctttttcatcaatgggatccgaaaagctctcttacgtctaggaatcttgcaagaaacagtcgatatctggatgcttccaatctctttgatctatgctggcttgacaggtttttctgtttcagtcgttcgcagtctcttacaaaaaatcctctctcaaaagggcatccgagggatggaaaatatggcgatgaccttgatgctcttaatgattctcatgcctaagtttctcctgacagctggaggcgtcttgagttgtgcctatgcctttattttgaccttggtagatactaattcttattcaggaattaaaaaggtgctagtggaaagtttctggattagtctggggatcttgccgcttttgacctattattttagtgtctttcaaccatggtcactcccattaaccttcctattttctttcttgtttgatcttgttctccttccagggttaacagtgctgtttatcttatcgattctaaagccgcttacgatttttaatagtttctttctactcatagaggagtgtattcgttggatctcaaagctcacgtcgctaccgttggtatttggtcaaccgacgggattagctctgatcgtcctcttacttcttttagggaccttatatgatcttcgaaagcaaaagaaccttcgttttctgttcatcggtatgattctagtcatcttttgttggaccaagcatcctttagaaaatgagatcaccatggtggatatcggtcaaggagacagtatctttttacgcgattggaaaggaaggaccattttgattgatgtcggaggacgcgtcacttttaaaagtggagacaagtggcaagagcgcagtcaatctgccaatgcggataaaaccttgattccctatctcaagagtcgaggtgttggaaaactcgatgctttggtcttgacccatacagatcaggaccatatgggcgatatgctagaggttgccagacaaatcccggttaaaaaagtgtatgtcagtccaggcagtctaactagttccaaatttcaagagaaattgaaacagcttcatagtccagttaaagtagtccagagaggggatcaacttcctatttttgatcatcatctcgaagtcctatctcctgatgaagtgggggatggcaaaaataatgattcgattgtcctctatgggcagttttatcagaaacggtttttgtttacaggtgatctggaagaagctggggagaaaaaactattgggaaactatccccaattacaagtggatgtcttgaaagtaggccaccacggatcgaaaggttcctctagtgatgtatttttggatcagctacatcctcaattggccttaatctccgttggaaagaaaaatcgctaccagcatcctcataaagaattgcttgatcgtttagaggaacgatccatttcttaccttcgtaccgatgaaagaggagcgattcgcttgattgggtgggatcattggagggtagaaacggtccgctagagatgaggagaggtttgctttctatgctgaaaattgctattatagaaggtgaaatcaatgtaaaggtagaatcgtatgaacgcatttaagcaattttggatacagtatgcagatttttcaagtaagaccagtcgagctcatttttggctagcttttttctggaatttcctgatttctttgcctctttgggttttttacatcgtgacttctttatcccatcaaaatgctcaagaaatattcaatttttcaactgttcattctaaaacaggtctatgggcactcgctttcttagcattcttttacttcctcattttagtacccagtcaagccatttgtgtgcgtcgcttacgggatgctgggatccattggtcttggatctttttgaaccttggtccggttttactctatttattgtcagggctagatattttcctatttctttgggtgattacagttatttctctcctgattctcatgatgcttccaggaaaaaataccttcccacgaccagtagaaactcctatgggagtaacttctgaaccacaggttacagcgacagaaggaagctttggaggcaactcgtttgagcaaattcctaattttgtagcagctccagatttgtccgacgaaaaaccaccattggaacaaaaaatggttgctgaacacgaaatacactagactgatagagataagagagtttcatgcaagcaattaccgacactaaacatctgacggttcaaactctgccttctattcttgtcttgacaggcgaggatgtaggtcaatttgaatggttaaaaaaagacattttaaaaaaaataggctatgatccctcagatttgaattattcttattttgatatgaaggaagcctcctatgctgaggtagagctggatttggtcagtcttccctttttcgctgataaaaaaattgtgattttggatcacttgttggatctgacgactaccaaaaaacgctatttaaccgatgaagaactaaagcaatttgaaagttatctggaaaatccttctgaatcgacccgtttggtgatcattgcagaaggaaaattagatagtaagcgtcgcttggtcaaactcctaaaacgggatgcccaaatcattgaagcggcgactcctaaagagcaagaggtaaagcgctattttgcaagccaagcccaagaattgggcctgcaatttgtgggcgattccttggaccaactactcttaaaatctggctatgattttggagagttacagaagaatctcgctcttttgcaggcttataaagaggatggtcagattaccctcgaagatattgaggaggttgttcccaaaaccttgcaagataatatttttgatctgacccaaatgattctcaaacgccaaatcgatcaagctcggaatttggtgaaagatctccgcttacaaggagaagatgaaataaaattgattgctattcttttggggcaattccgaatgttttctcaagtaaaaatattttcagaagaaggccaatccgaaaaccaaatcgtagcgagcttgtcggagttgtcaggacgcaaggtcaatccatatcaggtgaagtttgccttacgggatagccgtaagctttccctgtcctttttgaagcaggccatgatgaccttcatcgagacggattatgcaattaaaagtggaacgtatgataaagactacttatttgatttggccctgttgaaagtggcaaatagcgtctaaacatgaatgaaattgcaagcagattagttgaataatttagctgtttgcgttatcatcaaatcagtaataaagaaaagaggaccataaaatggctatcattttaccagaattaccatatgcttatgatgcattggaaccttatatcgatgaagaaaccatgcatttgcaccatgataaacaccatcaaacatatgtaaacaatgtgaatgcagctcttgaaaaacatcctgaaattggagaagaccttgaaagcttgttagctaatgttgaatccattccagctgacattcgccaagctgtgatcaacaatggtggtggtcatttgaaccacgctcttttctgggaattgatgactccagaacaaacagctccttcagcagaacttgctgcagcgattgatgccacatttggttcatttgaagacttcaaagcagcctttacagcagtagcaacgacacgttttggttctggctgggcatggttggttgtcaacaaagaaggtaaacttgaagtcacttcaacagcaaaccaagatacaccaatctctgaaggaaaaacaccaatccttggtttggatgtttgggaacatgcctactacgtaaaataccgtaacgtacgtcctgactacatcaaagctttcttctcagtgatcaactggaataaagttaatgacttgtttgcagcagcaaaataataaaataaaggaatctataagagcgacaattggctcttatagatttttttgtttgtatccggaaaatcggagtataatttcttgcgtttggacaggaaaatgatacactagtaggagtgtgtcttacttatcaaaagcccagtttgaagggcctaggcaaggaaaagatgaccgttaaaatgaaaactgaaacattcagggagaaatgaaatgactagtattaccattaccaaaggagcagttgagacgcctatctatttacggatgttgaatcgtcatggcttgattgcaggagcaacagggacagggaaaacagttaccctcaaggtcctcacagaaaaattaagcaaagagggcattccggtctttctagctgatatcaagggagatttatctggtttagccaaagcggggcaatggactccaaaactggaagaacgctacaaactgcttggtctcacagatccgtttgagccgcaagccttccctgttcgattgtgggatgtctttggccaagctggtcatcctgttcgtgcgactgtcgaaggaatggggtcattgcttctttctcgtctacttgatttgaatgaaactcaatcaggaattcttgcaattgtctttaaagtggctcaagagaaagattggcccttgattgatttgaaggacctgcaaagcctgttaaaggaagtctatgaacacagctcagactattctgcccaatatggtaatatcaccaaacaatctgtcggtgcgatccaaagaagcctcttggttcttgaagaagaaggagcggatcagtttttcggagagcctgcacttgatttaaatgactttatgcaactcgatgcatcagggcgtgggtatatcaatattctttcggctacaaagctctttcattcaccaaaattgtattcaacctttttaatttggatgttgtctcgtctctttgaaacacttcccgaggttggggatcccgaaaagccaaaactggttttcttctttgatgaagcccatctcctctttaaggatgcaagcaagctctttcttgagaaggtcgagcaagtcgtgcgcctgattcgttctaagggtgtagggatttactttattacccaaaatcctcaagatctaccagaatctgttttggcacagcttggaaatcgtgtacaacatgctcttcgagcttatacaccaaaagaaatgaaggccatcaaggtagctgcccaaagttttcgtccgaatccagactttgatacagaaacagtgatcacagaattagggacaggggaagccttggtttctttcctgaatgagaaggggcaacctagtgttgttgagcgtgcttatattctctctcctcaatcgagttttgacctcttaaatgaaagtgaacaattggccttaatcacgacatcgcctttccatcaaaagtatgcgacgacgattgatcgggaatctgcctatgaaaaattagcagctaaagcaagcaaggaagcacaagaagaggagaaaaaagaagcagaaaaagaacgagctacggcggaaaaagcagagcaaaagcgcagtccaggtcgcccaagaaaatccagtcttgaaaaagctaaggattccttcttgagttccttattccggacgattgcgcgtgagatcgctaagctaattatgggctcctttaaacgaaaataagcctttgatgaaaagaaataaactttttaaaaagaaatcgttttctatttctgataattcttgttattttcagtagaatcttttataattaatctcgtatgaaaaaatattttaatctacgctcgatcatgattgcgatcagtattctattgtgcttagtgggaacaagcgcactgggctacttgcatattacgcaaccaacagcatcagcaattgaaaaaaaagcaaagaaaacaaaagaagcaaaagaaaaagatatagaacagtctacgcctgagacgaaaaaaccacgtgtcaaatctcctgaagctaagcaagcagtagtagacgcagacatggaaacgatgagtgcttatggccttgtctatgattatgctaataaggggttggtagaggttgtccaggatttcctagcggaaagtggaattgatccgtcacaagttgccttcacgtatcgcaatgccattacaggagagcaatttgccatgaatgatcttcaaccaatgacggcaggaagtacctataagctaccgttgaacatgttggtggtggatgaggtcacaaaggggaaactcaatttaacagatcggtttgacattaccaatacctactatgaatatgtaggggaacatgacaattacgttgctgcctttgatggagccatgtctatccctgatatgcaacgctattcattagtttactctgaaaataccccagcctatgccttggcagatcgtttagggggaatggagcaagcgcgcaagttattcagtcgctatggtcaatctcgctcaccagaagtcaaaacctttagcgaagataataaaacgacaacggattattatatccatgtcttgcaatatctttggaatcatcaagaaaaatatgcagatttgttggaattgattggggaatctttcccaggtgagtactataagaaattcttgccagatttggtcattcaacaaaaaccgggatatgttgcggaagcgctcaatgtggatgccattgtccatgaatcgaccccttatttggttgccatctatactgcaggactgggtggaacgaccccagaaagttctgaaatcagtggtgttggtctttatcaattgggtcaattggcttatgttattaatgaatggcatcgtgtgaatatgaatgaataattgacggaaggtctgagggttgctcagaccttttcttctatcacagtagcataaaattcacttggtgtttcgaaatacttttctgttttaaagaggcttctttccctcttctatcaaaaaatatgttatactaattaatagtaataagaggaagtataaacatgattacaaaggaagattaccagttggtccgctcgcatccagccttctctgcgttgccagtggagctatttgataaattagctgttgaaattcatgctagggatatacaaaaaggacaaattttattttatgcaggagataagcgggatcgcatttttcttctttcaaaaggctttgctcgcattgagcaattcgattcgtctgatcaattttcctatatggattatatcaaaaaaggggccctgttcccttatggagggatgtttcaggatgagcgttaccactatacagctagtgcggtgacagatttgcgttgtttcgttatccccgtcaacctctatgaatcatctgcccaagagagtaaggagcagttgctcttcattacgagaaagctctcgtcaattttagaatttcaagagttgcgtctacgtaatgtcgtgacagctagtgccagtgagcgtgtggttcaatctttagctatcttgtgtaaggactatgaaagtttaggaaatcaacttccatttccaatcagtatgaaggaattggccaaattagcggccacaacccgagaaaccgtcaatcaagttttaaagaaactcatcgattctcataagatacaatatgaaagaaaacaattaacctttctagatacagcctactttttaaatagttttaaagagatcaattaatttgttgatcttttttatttttgtaaaaaaatatatattcataaaaataatataaaagacaaaatatgcaaagaaaacgcttcatattaactaaaaaataggaataattcaaaataatgccaaattctttgcattaaaaaagtagaatccttcatgaaagcggtaccaattggtgataaaataaaacctgtaaacaggattaggtaagctaaaccgcaagaaaaaggaggactatagatgtctacacacccaattcatgttttctcagaaattggaaaactgaaaaaagtttgtttgcaccgtccaggtaaagagttggaaaacttgatgcctgactatcttgaacgtcttctttttgatgatattcctttcttggaagatgctcaaaaagaacacgacgcatttgctgaagcacttcgtaacgaaggtatcgaagtactttatcttgaacagttagctgctgagtcattgacttctccagaaattcgcgatcagttcatcgaagaataccttgaagaagcgaacattcgtggacgccaaacaaaaattgcgatccgtgaattgcttcacagcattgaagacaaccaagaattggttgaaaaaacaatggcaggggttcaaaaagctgaacttccagaaattcctgaagaagcaaaaggattgacagaccttgttgaatctgactatccatttgctatcgacccaatgccaaacttgtacttcacacgtgacccatttgcgacaattggtaatgcagtatcattgaaccacatgtacgcagatacacgtaaccgtgaaactttgtatggtaaatacatcttcaaataccacccagtttacggtggaaaagttgaacttgtctacaaccgtgaagaagatactcgtatcgaaggtggagatgagttggtactttctaaagatgtattggcagttggtatctcacaacgtactgatgctgcatcaatcgaaaaattgttggtaaacatcttcaagaagaacgttggcttcaagaaagtattggcctttgaatttgctaacaaccgtaaattcatgcacttggatacagtattcacaatggtggactacgataaattcacaatccacccagaaatccaaggtaaccttcgcgtcttctctgtaacttatgaaaacgaacaattgaagatcgttgaagaaaaaggtgatttggctgaattgcttgctgaaaaccttggtgttgaaaaagttacattgatcccttgtggtgatggcaatgtggttgctgctgctcgtgaacaatggaacgacggttcaaatactcttacaatcgcacctggtgtggtagtcgtatacgaccgtaacacagtcacaaacaagaaattagaagaatacggacttcgtttgatcaagatccgcggaagtgaattggttcgcggtcgtggtggacctcgttgtatgtcaatgccatttgaacgtgaagaaatctaatgtagaagaccgagagctggtcttgagggatcagctcttccttcttactgatcaatactagaaagaaaataggagacaattagaatgacaaattcagtgttccaaggacgtagcttcttggcagaaaaagactttacacgtgcagagttagaataccttatcggactttcagctcacttgaaagaccttaaaaaacgcaacatccaacaccactacctagctggtaaaaacattgcgcttttgtttgaaaaaacttcaactcgtactcgtgcagccttcactactgcagctatcgaccttggtgctcacccagaataccttggtgcaaacgacatccaacttggtaaaaaagaatctacagaagatactgctaaagttcttggacgtatgtttgacggtattgaattccgtggtttcagccaacgcatggttgaagaattggctgaattctcaggtgttccagtatggaatggtttgactgacgaatggcacccaactcaaatgcttgctgactacttgactgttcaagaaaactttggacgtttggaaggtttgacacttgtatactgtggtgacggacgtaacaacgttgcaaacagccttctggtaacaggtgcaatccttggtgtgaacgtacacatcttctcaccaaaagaactcttcccagaacaagaaattgttgaattggcagaaggattcgcaaaagaaagtggtgctcatatcttgatcactgaagatgctgacgaagctgtaaaaggtgcagatgtactttacactgacgtttgggtatctatgggtgaagaagacaaatttgcagaacgcgttgcccttttgaaaccttaccaagtaaacatggaattggttaagaaagctgataacgaagacttgatcttcttgcactgcttaccagctttccacgacacaaacactgtttatggtaaagatgttgctgaaaaattcggcgtagaagaaatggaagttactgacgaagtgttccgtagcaaatatgctcgccactttgaccaagctgaaaaccgtatgcacacaatcaaagcggttatggcagctactcttggtaacttgtacattccaaaagtttaagactttataaccgtataccaacagctataggggctggactgctagctttagtcctgcccctattttttatagaaagggaaaacctatgtcaagaaaaatcgtcgttgctttgggaggaaatgctattctctcatctgatccttctgcgcaagctcaacaagaagcacttgtagaaacagctaaacacttagttaaattaatcaaaaatggggatgacttgatcatcactcacggaaatggtcctcaagtaggaaacctcttactccaacacttggctgcaaattctgaaaagaacccagctttcccattggattcattagttgctatgaccgaaggaagcattggctactggcttcaaaacgctcttcaaaatgctcttcttgaagaaggaattgaaaaagatgtggcttctgttgtgacacaagtcgttgttgataagaacgacccagctttcgttaacctcagcaaaccaattggcccattctactcagaagaagaagcaaaagcagaagctgaaaaatcaggtgcaactttcaaagaagatgctggtcgtggctggcgtaaagttgtggcttcaccaaaaccagtggatatcaaagaaatcaataccattcgtactttgttgaacgacggtcaagtcgtggtagctgctggtggtggcggtatcccggttgtgaaagaagcagatggtagcttgactggtgttgaagcggttatcgataaagactttgcatctcaacgtttggctgaattggtagaagcagacctcttcatcgtcttgactggtgtcgattatgtctttgtgaactacaacaaaccagaccaagcgaaattggaacatgtgaatgtggctcaattggaagaatatatcaaacaagaccaatttgcaccaggaagcatgcttcctaaggtggaagctgccattgcctttgtaaatggtcgcccagaaggaaaagcagttattacatcacttgaaaaccttggagctttgattgagtctgaaagtggaacaatcatccaaaaagactaatgaaaaattaggaaaaaactagtattttaaagcttattgtgatagaataagtctataggtaagcgttttacaagagactcttgtaaaacatcactcacactttgttgcgttaggaggaagacaaatgagtgaaaaaacgaaaaaaggatttaagatgccttcatctttttccgtattgttgatcatcattgccattatggcagtgttaacttggatcattccagctggtcaatacaaagttgacgatgcaggtgctatcattgcaggtagttatgaatctgtaaaagcacatcctcaagggatttgggatgtcttgatggccccaatcaatgccatgcttggtaaagcaccaaccagtgcagcgattgatgtagccttcttcatcttgatggtcggtggtttccttggagttgtgaacgaaacaggtacccttgatgtagggattgcttctatcgttcgtaaatacaaaggccgcgaaaaaatgttgattttgatcttgatgccattgtttgcccttggtggtacaacttatggtatgggtgaagaaaccatggccttctatccacttcttgtacctgttatgatgtccgttggttttgacagtttgacaggggtagccattatcctcttaggatcccaaatcggatgtttggcgtcaacattgaacccatttgcgacagttatcgcatctgatactgcaggtatctcaagtgcttcaggtctcttacttcgtgtgatcttctggatcgtattgacaggacttagcacatactatgtataccgttatgcagataaggttcaaaaagacccaaccaaatctctcacctatgcaactcgtgaagaagatttgaaacacttcaatgttgaaagtggcgaagaaattccttcacaaatgaacaagaaacaaaaacgtgtcttggtcgtcttcatctcaacattcgttatcatggttgctggatttatcccattcaaagatttgggtattaaattctttgaaaccttcaacgaatctctccataaaattccagtacttggtcaattgatcggtaacacagatgctcttggtacatggtacttccctcaaacagctatgctctttgccttcatgggaatcctcgttggtatcatttatggcttgaaagaagataaaattatttcatctttcatgaatggtgcagctgacctcttgagtgttgctcttatcgtagcggtagcacgtggtatccaagtcatcatgaacgacggtatgatcactgcgacaattcttcactggggtgaagaaggacttaaaggtctttcatctcaattgttcattgtcttgacttacattttctacttgccaatgtcattcttgatcccatcatcatctggtcttgccagcgcaacaatgggtatcatggcacctcttggtaaattcgtcaatgtaccaggtagcttgattgtcacagcttaccaatctgcatctggtgtcttgaacttgatcgcaccaacttcaggtatcgtaatgggagctcttgctcttggacgtgttgacttgagtgcatggtggaaattcatgggtaaattggtcgtagcgattgttgtgatcaccattgcccttcttctactaggaactgtggttccattcttgcaatagaataaagtaggtgtttcatgaaaaatagaataaagaacgatgtaaaagagcagtttttaaactcgcttcaaaccatcatttcttacccctcagtattaaacgaaggggaaaatggaacaccgtttggacaagctatccaagatgtcctagaaaaaaccttagagcttgctcgagaattaggttttcaaacatatatagatcctgaaggatactatggatatgcagagatcggtcagggggaagaactcctggccgttctttgtcacttggatgttgttccagccggtgatctaaaagattggcaaacgccaccttttgaagcgaccattgtcggtgactatctagtaggtcgtggtgtgcaggatgataaggggccgtcactcgctgccctctatgcagttaagagtttactggatgatggcatccagtttaccaaacgaatccgctttatttttgggacggatgaagaaaccttgtggcgctgtatgaaccgctacaaccaaatcgaagagcaagcagatcttggatttgcaccggattcttctttcccattaacctatgctgaaaaaggcttattacaagtgaaattgcatggtccaggttgggatgatcttcccttacaggctggtcaggccctcaatgttgttccagacaaggcgacctatgcgggtcatcgtttggaagagttgcttcctgttttggatcaaagtggggttcagtatagccaaacagaagattctgtaacggtcttgggtgtttccaagcattctaaagatgcagctgaaggagtgaatgctattgtcggtttagcggaaagtttatccctcatccaaccccatccagcctttctctttattgcagatgctgttggtgaggatgcaacgggagaagcgctatttggccctatttcagatgaaccaagtggcgatctttccttcaatcttgcgacccttgtgatcgatcaagaacaatcggaaatcgggattgatatccggatccccgtcttagcagataaggaggccttagtagctcgtttgcgagaaattgcagctagttatcagttggaatatgaagagtttgattatctggctcctttatatgttcctttggatagtcctttagtcagctctttgatggccgtctaccaggaagaaactggtgataagacgccagctatgtcttctggtggtgcgacatttgcgcggaccatggaaaattgtgtcgcttttggggctcttttcccaggtgcagaacagaccgagcaccaagccaatgaacgtgcaaaaattgaagatctctacgcagcgatggaaatctatcgagaagccattcaacgcttagccacaacataaaaagtttggaaacttggtttccaaactttttatttactaaagaagaagggtggggtgaattcttttaatttttcaaagcaatccaaagctccttggttgtcttcgcagataaccaaacagacatcgtctccacagatggtggctacaatttcttggagttccagtgcatctaagattgctccaaaggattgggccagacctggaagagtttttacaacgacctggttttgaacgggccgcaacatgactaaggcatcttccatatacatccgcagtcgcttttcccaacgggaaggagcgatggtgttcatggcatagtaggaactatccccctcgttaatttttactagattcaaggatttgacatcccgtgaaagcgtggactgggtaacgagaacaccattggcttctaaggcttcctggagttcttgttgggtatgaatcctacgctcagaaatgatcgagcggatcaagcgatggcggctttcaattttattcatgagagactcctttacttgatgaacatagcatccccaaagctgaagaagcggtaccgttcctgaatagcatggtggtaggcttcgagggttaattcgcggccagcaaaggcagaaaccaacatgaccagagttgattttggaaggtggaagttggttgaaaaggcgtcgacgactttccattcataacctggtttgataaagatattggtccaacctgaatcggcttggatgtctccatcaaatttattgccaattgtttcaagggttcgaatagaagtcgttccaacagctacgatgcgttttcctgcagcttttacctgacgaagggtagcagcagcctcttcagaaagttggtaaaattcagagtgcatctcatggtcttcaagattgtccacggatactggacggaaggttcccaggcccacatgaagggtcaaatagaccaggtgaaccccttttgcttcaatcttttggagcaattctttggtgaaatgaagacctgccgttggagctgctgcagaaccattttctttggcgtaaacggtttggtagcgctcgcggtcagcaagtttttcgtgaatatagggaggaagtggcatttcaccaaggctttctagaacttctaaaaagatcccttggtagtggaagcgaacgatacggcctccgtgctctaattcttcctcaacggttgcggtcaaccgatcatctccgaagctgactgtggcccctacctttaagcgttttgcaggttttgccaagacttcccaacagtcatcttgcgtatttttaaggagaaggaattcgacgtgaccacctgtttctggtttgactccatgaaggcgggctggtagaacgcgcgtattgttcatgacaagagcatctcctggctccaattcatccaaaattgcatcaaaatgacggtcttggaattgccctgtttttcgatcgaggatcaagagtttagaggcatctcgtttttcaagaggggtttgagcaatcagttcttcaggcaaatcaaagtcaaagtcgttagtattcatttgcgctccttttataataaatttgtgagtagatagatggtagtcccgacagctaagagcatcaggctgattcccatcaaaaagatcaggaccttgagaatctttctttgatgaatcaagaaagataagagaaagacaaggagtccgatcaaaaaaatgatgaataatagtgatacaatcatacctttcattatatcacgaatcgacttgaaaatgaaaaaaatgccagaaaaagatagcggtttcacttgacaaaaattggtctataccatataataaaagcatagagaaataggaggtctatccaatgaaaattattgaagtaaaggaccaaattgagggtggaaaagttgcctttgatatattgaaagaaactttaaaggaaggtgctcaaaccttaggtcttgcgactggaagcagtccccttgagttttataaacaaattcgtgaaagtgatttggatctgtctaatctaatcagtgtgaacttagatgaatacgtagggttgacgggagatgatcctcaatcttatcggtatttcatggagaaaaacctctttgatgccaaaccattcaaagaaagttatctcccatcaggtgtagaagaatctgccgatcaagaagtgatccgttataacaaaatactcgaagaccatccagtagatcttcaaatcttgggaatcggacgcaatgggcatatcggttttaatgagccagggacatcctttgatagtcagacccacttagttcagttggatgcctctaccattgaggccaattctcgtttctttgataagatcgaagatgtaccaacccaagccatttcgatggggattgccaatatcttagctgcgaaatcaattgtcttgtttgcttatggggaatcaaaagcccaagcaatcaaaggtacagtagagggtgaaaggacagaaaaagtgccagctagtgcccttcaaggacatccaattgtgaccattattgcggataaggaagccttgagcttgttaagtcgataaaaaacaggacctatcgccgatttattcgggccagataggtttttttctgcttcaaaatatggtacaatacaagtaattatctgctgggattagctcttttcatctactgggagacaagaggaaagggcatgagggctagaagcttattttagcctccagctgattagtctgttataaaggaaaagtttatgataaaaaaatatttgatccatatttgcctccttctgagtctcttatgccagccagttctagcgagtgcggatgaattggtagatatggcgcaaaagatgtatccaaatgacaatgtccaagctataaaccgtccacattcttcgctcatcattgacggcaatacgggaaatgttctttggaaagacaatatcgatgaagccagagatccggccagcatgagtaagctcatgacgctctatctcttgtttgaagatatggcaaatggcaagatcagtaaggatacagtgatcaaggcgaccgcttcagaccaagcgatcggaaagatctatgagatctccaacaataatattgttgctggagtagactacaccattcctgagttgattaccatgacagtggttccatcttcaaatgtatcgaccctcatgttagccaatctcatgtccaacaatgatccagacgcctttatcgagcgcatgaatgccaaggctaaggaattagggatgaccaatacagtctggaataacccgagtggggcggccatctccaccttgcagggctattatcaggtcaacaattatccaaatgatgcagccaaccagacaacagcgcgtgatttagggattctggtttaccatttcatcaatcaatacccagatattttaaactataccaatcaagcacaagtcacggtcaaaaaagggactccgtatgaggaaacctttgatacctacaattattcattgccaggagccaagtatgctttgaaaggtgtggatggtttaaaaactggatcaagtcctcgtggagctttcaactatatcgcgaccatcaaacggggcaatcagcgcttaattgctgtcattatgggcgtaggagattgggcagaccaagatggggaatattaccgtcacccgtttggcaatgccttgatcgaaaaagcctataaagattttggctataaaaaattgttagatgcaggtgtccagaagattgacggcaagacctatacactcgaaaaacccttctatgcaacggtcaaaaaaggtgctaaagaaccgacccttgcggtaaaagatggctatttgacagtagataatgatctctacaccttgtctgagggtatccgagatgatatgaaggtggaagaaggatccaagccagagcttgtcaaagaaacagtaagtgggaaaaagacaacggctaagcacagtaaatggctttcgctggatcacttcctgatcttgattccgattcttattcttatcatcattctttcgattgaaaaacaaagtcgtgagagacgcaaaaaagaggctcaaaagcgctataataaagaataaaataaaacctaactgattgtcagttgggttttgtcattgtcccattccgatatttttagaaaggatttaaatgaaaaaattccgaaattcttatgcggcttatatgctgctctatagtttttattttatgtccacatctctctttacgacccttatttccgtttatttgatgggaaagcactatagtgcaactcaagtgtcgaccttggtatcggttgcctttttcttatccatggtagcccaacctttttttgggtatatcaatgagcgatttggaatcgtaaaaatgacgaccctcagtctgagtgtgatcattggtggtgtcttcggttttctttgggcccccaatctcttttggctgaccgttttttatgggattgttctagtctgtttgaatgggacagctcccatgatggaagtttttgcaacgcaaagtccatacgcttttgggaagattcgcgtctggggaaccattggctactcggtcggtgtccaaatagccggctgggtctatcatcagtttagcccccaagctgtctattatacggttttgatcactattgtattgagtctcttctgcctaagtgcggttcgaatgaagaaaaaagagacagtcgtagaaaaggaaaaacaccctgtctctattcgtcctcttcttcacaatggaccttatctcttctttattgtgttgattgggttggcttcaggggttggaaatattggtcatacctatattcctgagctactcatggatagtggtctaccagtgcatattgcctcaacagttgtggctgtctcagtcgtagtggaagcccccttgatctttttctctgatcgattcatggaccactggcctttacgggttttgatcgctcttccaattgggattattttcgctcaatatgctgtctatgctcttccaagtcctgtcttcttaaaagtgataatgactctcttagccaagcatacaacagggatggttttgattatggtctccttacggtttattgcccaacaggtgaatggcaaagacttggttcttgccatggccattgtccaaggagctcgttatttaggaaccattctcttacaacccttcgcagccctctgtattgaaagaggtggttaccaagtcatgagtttctttttagcaggggtagtagggatcgtctttttgctgagctttgccttaaaaatgccccaagggaaggctcacggcctttttggtggcaaagtagactaatgaaattgttacaattgtatgactaatcatcgaggagttggacaaaacactgatttcacagtgttttgtccaacttttttgctattattaagaactagtgattaatttgacagtcaaagtattcgatggtagaatgaggtaaaataaatataaaggagaccattttatgaaaaaaatgatcttatcgacagctgctcttttgacgattgtttccctagctgcttgttcaaacaaacaagacacaaagaaggaaacttcaaatagtcaatcaacgactaaagtgacgagcaaatctgccaacacttcaaaaagcaaggatacttcaacagattcagaagagacttcatcttctagcctcttaacagacgctgaaatcagcaaggctaaaacagttggagactttaaaaagttgtttgcaaaattaatggatcaatctgtttctattactgaagaagcaggtacttctgtgacaggttctgcaaaagaacaatacgatgcaatgattagtaccttaaagcaaggattagaaaaccaaaaagatatctttaatgaaggcttggaaagcatcggttcagatagcacagtcgttcctaaagaagaccgtgaagctttgatagaaatcttgaaagatgctcgtgaagagttggaaagtactcgtaaagaaatgaaagatatgcagaaagaattgagtaaatctcctgttgcagatgacgacagtgatgattcagcttcagattctgaagaataaaaagaagaaaggttggaatttccagcctttttcctatttttttttcgaatgatatagatgaggaggtgggcctatgtttattgccatggataacaatcaaaagcggtggaactgtatggaagagatcccagctgtgacagaaggtcccttctattgcttggcttgtcatagtccagtgcgtctaaaaaatggctcggttctacgggctcattttgctcatataaaattacagcattgtccctatcatcacgaagctgagagttttgaacatctggaattaaaagcttgtctttatgattgggcctctaaggaatctcatacagaagtagaaagttatttagcagactttcaacaaattgccgatcttttggtagtagacaagaacttagctttggaagtgcagtgcagctccttatctttagaacgcttgaaggagaggagcgatgcttatcgatcccacggttaccatgtctattggttacttggtaaaaagttgtggctcaaggaaagactaacaaagctacaggctggctttctttattttagtcagaatcgagggttccatctttgggaattggatctgacaaagaaagagctacgtctgcaatacctcatccatgaggatttacgagggcgattgcattatcaaacagaaattttcccttttggccaaaggtccttactggaagtcttacggaccccttacctttcgcagcccatgcagcatatggcagtcgagctcgatcgtacatttttaacgtatatacagcagcaactcttttatcgtcacccaaagtggctgaagcttcaggaagaactctatatgcagggacaccatctgatggaactggggctagatttcttttatcctctttgtcgtccgatcctttcacagaacttgctccaaattaaagaggatgtagaaggttactaccagcaatttatgacctattatcagtcgcaagggatccaacccgttcagatcctttatcccccacgtttttatgctcaacagaaaagctaactttctaagatagaaatcctcccgaaatgttcatttttatgctaaaatagtaccattggaggattaatcgaaatggtaaaacaacgtaatgaaattgatgaaaaataccaatgggatttgtcgacaatttttgcgacagatcaagcttgggaagaagaagcagctagcttagctgcagatattaaagcagcaagtcactatgctggtcatttgttggattcagcgcaaacacttttggatacaaccaatgcatatttggaattgagccgtcgcttagaaaaggtctacgtctatgcccatatgaaaaatgaccaagacacacgagtggctaaataccaagagtaccaatcaaaagggatgtctctttatagcttgttgggtgaaacatttgccttctatgagcctgaattcatggccattacggatgagcagtacaaggcctttgtgagtgaggttccggccttggaacaatatggtcattattttgatcgtttgctagagaagaaagaacatgtcttgtctcaaaaagaagaggaattacttgcaggagctggtgagatctttgcggctggtggtgaaacctttgaaatattggacaatgcagatattgttttcccaactgtgcatgatgacaagggcgaagaagttcaattaacccatggaaactatatttctttggtagaatcaaaagatcgtgccgttcgtaaagaagcttacgaaggtctctacaaggtctatgaacagtaccaacatacctatgctaaaaccttgcaaaccaatgtgaaagttcacaactttaatgccaaagttcgtaaattctcatctgcccgtgaagcggccctttctgaaaactttgtaccagaaagtgtttatgatagcttggtagcagctgtgaacaaacacttgccactcttgcaacgctatgtgcaattgcgttcaaaaattcttggaatctcagacttgaagatgtacgatatgtatacgccattatccgatacagactacaagtttacctatgaagaatcattggccaaagcagaagaagtcttggctgttttgggtgaggactacctttctcgtgtaaaacgtgccttcagcgaacggtggattgatgtgcatgtcaaccaagggaaacgctcaggtgcctattcaggtggttcttatgataccaatgccttcatgttgttgaactggcaagatacattggataatctcttcaccttggtgcatgaaactggtcacagtatgcattctagctatactcgtgaaacccagccgtatgtctatggggactattctatcttccttgctgaaatcgcctctacaaccaatgaaaatatcctaaccgaacgtctgttagaagaagtagaagacgatgcaactcgctttgctattttgaatcacttcttggatggcttccgtggaaccgtcttccgtcaaacccagtttgccgaatttgagcatgccattcataaagcagaccaagaaggtacggtattgactagtgagttcttgaacaacctttatgcagagctcaatgaaaaatactatggtctttcaaaagaagacaaccctgagatccaatatgaatgggctcggattcctcacttctactataactactatgtcttccaatattcaacaggttttgcagcagcttcagccttagctgaaaagattgttcatggaacacaagaagatcgtgataaatatatcgactacttgaaagctggaaattctgattatccactcaatgtcatccgcaaagcaggtgtggatatggaaaaagaagactacttggacgcagcctttgcggtctttgaacgtcggttgaatgaatttgaagccctagtagaaaaattaggactcgcataagatggtagagtcttatagtaaaaatgccaaccacaatatgcgccggccagtggttaaagacgagatcgttgactttatgcgcacgcgtcaaaaaccggtagcaggtgccttggaggagttagaagcattcgcccgcaaggaaaatattccgattattccgcatgaaacggtagcttactttagactactcttgcaagccctacaaccaaagaaaatccttgaaattgggacggcaattggattttcagcgctcttaatggccgaaaatgctcccgatgcacaaattaccactattgatcggaatgaagagatgattggctttgccaaggaaaatctggctaaatacgatcagagaaaacaaatcaccttgcttgaaggagatgcagtagatgttttgcaggatttgacagagacctatgactttgtcttcatggactctgctaagtctaagtacatcgtctttttgccacgaattctcgaactcttagaggttgggggagtcgtggtattggatgatattttccaaggaggagatgttgccaaggacatcatggaagtgcgtcgtgggcaacgaaccatttaccgggggcttcagaacctctttaatgcgactctcaatcatccagatttgaccgctagtttggtgccacttggagatggtattttaataattcggaaaaatgcagagacggtaactttgccagatcctagctctttttaggtaaatttaaggtattctctctaatttgtggtaaaatagaagaagtttaaaaaggaacggagaataattttcatgaagaaaaaacttgtagcgggtgctgtgaccttgctatcagtcgtaacactagcagcctgtgccaatggcacaaacaaagatgtcgtgaccatgaaaggggacacgatcacagtttctgatttctataatgaaatcaaaactaaccaaggtgctcaacaagttcttttccaaatgaccatcaataaagtctttgaaaaagaatatggatcaaaagtttctgataaagaagtcgataaagaattggctaaacaaaagaaacaattggggaaccgattcgatgcttacttggcgcaacaaggcttgacggaagaaacagcgaagaaacaaatccgtagcaatatgttgttagaatatgcagtcaaccaagctgctaagaaagatatcaaagagtctgactacaaggcggcttttgaatcttacacaccagaagtaacagcacaaattatcaagttagattcagaagacaaagcaaaagaagtgttggaagcagctaaagcggaaggtgcagactttgcccaaatcgccaaagacaattcaacagatactactacaaaagacaaaggtggcgaagttaagttcgattcaggaacagcagatattccatctcaagtcaaagaagctgcctttaagttggatgaaaatgggatttcagatgtgatcacagtttcagcaggtcaaaactattctgctagctactatattgtcaaattgaataagaagacagaaaaaggttctgactggaagaaatacgaaaaacgtttgaaagagatcattgttgacggtcgtaagcaagataccaactacatccgtagcattattgcaaaagcgatgaccaatgccaatatcaaggtcaaagatgatgccttcaaatcaacatttaaccaatatttgcaaaatatcggtgttcaaacgagcgatagcagctcatcatctaaaaaatagttgacggttccttttggaacttgtataatgaaatagttgagaataaatcattgttactcggaatcagagaagtggcgggggtgcgagccatggaagagaaatgattttgctactcggctgagacaattgcatacaaaatgaagaatgacaagttcattgaatgaaggtggtaccgcggtttttcgcccttcgtttagtggcttgtcttttgtttgtgggcagttgtctggagctttttaaaggagatcaaaagatgcgaacctatcaagtgaaacaaaaatttcgattgggtggcgagcggttcgatatcaaagatgagttgggaaatgttgagtaccaggttgagggatcttttcttaagattcccaagacttttaccatctatgataagaatggacaagaagtgagccacattactaaaaaaacaatcagctttcttcccaaatttgtggttgagttgaaggatggggaccgcttttttatccataaaaaactgacgctctttagagacaaatacgatatcgaagatttgggactgagggtacaaggaaatatctgggacctagaattcaaattgtttgatgatcgggatcaaatcgtcgctgagattagcaaggaactctttcatctaacctctacctaccaagtatcggtgtatgaggatgaatacgctgatttagtcatctcactttgtgtcgccatcgattatgtcgaaatgttagaagctagcgcaaattaatcttaaagaaattaggagacaaatatgaaacaattatctagtgcacaagtccgccaaatgtggcttgatttctgggcaagcaaaggccactctgtagaaccatctgttagcttggttccagtaaacgatccaacccttttgtggatcaactcaggggttgccactcttaaaaaatacttcgatggaactatcaaacctgaaaatccacggattaccaatgctcaaaaagccatccgtaccaacgatatcgaaaacgtagggaaaactgcccgtcaccataccatgtttgaaatgttggggaacttctctatcggagactacttccgtgatgaagccattacgtgggcttatgagcttttgacaagcccggaatggtttgatttccctaaagacaaactttacatgacctattatcctgacgacaaggattcatacaaccgttggattgctgttggtgtggatccaagtcacttgattccaatcgaagacaacttctgggaaatcggtgcgggaccttctggaccagatacagaaatcttctttgaccgtggagaagcctttgaccctgaaaatatcggtcttcgtctgcttgcagaagatatcgaaaacgaccgttacatcgaaatttggaacattgtcttgtcacaatttaacgctgaccctgctgttcctcgtagcgaatacaaggaattgccacacaagaacattgatacgggtgctggtttggaacgtttggtagccgttatccaaggggcgaagaccaactttgaaacagacctcttcatgccaatcatccgtgaagtggaaaagatgtctggtaaaacctatgatccagatggcgataacatgagcttcaaggtgattgctgaccacatccgttcgctttcatttgcgattggagatggggctcttccaggtaatgaaggacgcggttacgttcttcgtcgtctcctccgtcgtgcttccatgcatggtcaaaaattggggatcgaaggaaccttcttgtataaattggttccaactgttgggaagatcatggaaagctactacccagaagtacttgaaaaacaagacttcatcgagaaaattatcaagagtgaagaagaatcatttgctcgtaccttgaactctggtcaacactttgcccaaactatcgttgaagacttgaaagccaaaggtcaaacagtgattgatggtcaagatgtctttaaactttatgatacatacggattcccagtagagttgacagaagaaatcgctgaagaagctggaatgacagtcgatcgtgaaggttttgaagcagccatgaaggaacaacaagaacgtgcgcgtgcatcagctgttaaaggcggatccatgggtatgcaaaatgaaacccttcaaaacattacagttgaaagtagatttaactataatgctagtcaattgccttctaagttggtggctatcgtagcggataatgcagaagtagaagctgtttcagaaggaactgcatcactgatctttgcagaaactccattctacgctgaaatgggtggacaagttgcggaccatggtcaaatcttggatgctgcaggaaatgttgtagcgactgtgacagacgttcaaaaagcaccaaatggacaaccactccatactgttgaagttcttgctcctcttgctttgaaccaagaatacaccttggcgatcgataccaatcgtcgtcatcgtgtcatgaagaaccacactgcaactcacttgctccatgcggctcttcacaatatccttggtaaccacgcaacccaagcaggatctctcaatgaagtagaattccttcgctttgactttacccacttccaagctgtgactccagaagaattgcgtgctattgagcaacaagtcaatgaaaagatttgggaagcgatcgcagtcgaaacgattgaaacagatatcgatactgctaaagaaatgggagccatggccctctttggtgaaaaatacggtaaagaagtccgtgttgtcactatcggtgattactctgttgagctctgtggtggtacccacgtaggcaatacttctgaaattggtctcttcaagattgtcaaagaagaagggatcggatcaggaactcgtcgtatcttagcagtaactggtaaggaagccttcgaagcataccgtgaacaagaagacgcactgaaagcagtcgcagcaaccttgaaagcacctcaactcaaagaagtccctcacaaggtggaaggtcttcaagaacaactccgtcaattgcaaaaagaaaatgcagaattgaaggaaaaagcagcagcagctgcagcaggcgatgtcttcaagaatgttcaagaagcaaacggccatcgttacattgccagccaagtttctgtttcagacgcaggtgctcttcgtacctttgtagataactggaaacaaaaagactactctgatgtgcttgttcttgtcgcagccattggtgacaaggtaaacgtccttgtagccagcaagacaaaagaggtccatgcaggtaatgtgatcaaagaattagctccaatcgtcgatggacgtggtggtggtaaaccagacatggccatggcaggaggaagcaaccaagcgaaaatccaagaattgttggatgccgtatcaggtaaattgtaataatcggagaggttggatgtttgtccaacctcttttttcaaaaaagaagcagatccaattagaaaaaaattgcaacaaaaaaacctttccaaacggaaaggtttttgtcttataatccgtagttgtaatcgtcatcctgcatggcttctacttcaccgagaaggtaaccatttccgacttgagagaagaagtcgtggttagaggtaccggttgagattccgttcatgacgattgggttaacgtcatctgctgagtctgggaaaagcggatcttgtcccaagttcatgagggctttattagcgttgtagcgaaggaaggtcttgacttcctcagtccagcccacaccgtcatagaggctctctgtgtaaccttcttcattctcatagagggtgtagagaagatcatacatccactctttgagtttctcttgttcttcttctggtaattcgttaaaaccaagttggaacttgtagccgatataggttccgtgaactgattcgtcccgaatgatcaacttgatgatttcagctacgttagccaatttgttgtttccaaggtagtagagcggtgtgaagaaaccagagtagaagaggaaggtttcaaggaaaacgctggctactttcttttcaagaggagtcccattgaggtagatttcattgatgatctctgccttcttttgaaggtaaggattggtattggtccattcgaaaatctcttcgatttctgacttggtattcaaagttgaaaagatagaagagtaggattttgcatggacagattccataaattggatattgttaaagacagcttcttcatggggagtacgaatatccgcacgaagggcttgcacacccgtttcggattgcatggtatccaagagtgtcaatccaccaaagactttaccaactaggtctttttctttattcgacaactttctccagtcatccaagtcgtttgacaaagggatacgtgtatccaaccagaattgttcggttagcttttcccaagtcgatttatcgatgacatcctcgatggcattccagttaatggctttgtagtaagtttccatttgaaatctctttctttttctaattcattcgatcatacaatcattattattctaacacaattgttagaatactgcacaaaaagtcggcgaaccgactttttagtagcaatggatcagagtgtcttagatgacacagctttcacattggttggcgccaacttctccaccatcatctgtaaaggtacggacgtagtagatagacttgatacccttgttaaaggcgtagttccgaaggatagacaagtcacgagtggtttgtttgttttcagttttccattcgtaaagaccttttggaatatcgctgcgcataaagagagtcagtgaaagaccttggtctacatgctcagttgcggcagcatagacatcgatgacttttcgcatatccatgtcgtaggcagaagtgtagtaaggaatcgtttccgttgacaatcctgctgcagggtagtagatcttaccgatttttttctcttggcgttcttcaatccgttgtgtaattgggtggatagaagcagatacgtcattgatgtagctgatagatccatttggtgcgacagctaagcggttttggtggtaaagaccatctgccttgactttatcacgaagttctgcccagtcttctgcactaggaatgaagatgtctttaaagagctctttgacgcgatcagattttggtacaaattctccagtcgtgtacttatcaaagtaagtaccgttggcatagtctgatttttcgaagttgtggaaggtaacgccacgttcacgcgcgatgttgtttgattctacgagagtccagtagttcatgagcatgaagtagatacttgtgaactcaatagactcaggtgatccgtattcgatcaattgttgggcaaggtagctgtgaagtcccatggctccaagaccaaaggtatgcgcttggctgtttccgtggtcgatagttggaacggccacgatatgagagctatcggtgacgaaggtcaaagcacgaaccatagcacgaatcgaacgtccaaaatcaggtgaggtcatcatgttgactacgttggttgaaccaaggttacatgagacgtcagttcccattttaatgaattcttgagcatcgttgattaagcttggttcttgaacctggaggatttctgaacacaagttactcatgatgatttttccatcaactgggtttgcccggttagcagtatcaatgttgactacatatggatagccagattcttgttgcaatttagaaatttcagtttccaaatcacgtgccttaatttttgtcttgcggatatttggattagcaaccaattcatcgtatttttcagtgatgtcgatgtagttgaatggtactccgtattcacgctctacagagtaagggctaaagaggtacatctcttcattcttacgagccaactcgtagaacttatctggcacgacgacaccaagtgaaagagtcttcacccgaactttttcatcagcattttctttcttagtagaaaggaaggcgatgatgtctgggtggaagacgttgaggtaaaccacaccagccccttggcgttgtcccaattggttagagtaagagaagctatcttcaaagagtttcataacaggtacgaccccagaagcggctccttcataccctttgattggtgctccagcttcacgaaggttgctgagagaaatcccaaccccaccaccgatacgtgaaagttgaagggcagagttgatggagcgtccgatcgcattcatatcatcggttacttggatcaagaaacacgaaaccaattccccacggcgggcacgtccagcgtttaagaaagaaggagtagctggttggtagcgttggtggataatttcgtttgcgatgtctcgcgcgatagattcatttccatctgcaaaatagagagcattgaagaagacacggtcttccatgctttcaagatagtattctccatcatttgttttcaaagcgtattggttatagaatttgtaggccgccatgaaggacttgaattggaagttttgatctttgataaattgggccaattcctctaaaaattcaggacggtatttctcgataaaagctctctcaatgtaattgtgctcgagaaggtactgaatcttgtctgtaatcgagtcaaaggttttagtatttggtacaacattttctttaaagaacgcatccaaagcttctttatctttatgaagcatgatttggccgtttactggacggttgatttcattgttaagacgaaaatacgtcacatcttcaagagattttaatcccataataatccttttctagttcaaaaaaatgaagaggagaagtcctctctttccaagtaaaaagtctagtgttaggttgctaacgctagaccctatttaagcaaaatactgtgtttattaagaaagtttcttcaacttagctggttgaaaaccagaaaatacttcatccggtgtttgaataactggagcagcattgaagccaaggttcttaacatgctctacaaattctggctgttcatctaagttaatttcgcggtattccacatgattgctatcgaggaatcgcttggtcattttgcattgaacacaattattttttgaataaatggttaccatttcttttcctttctcctatcgaaatataaatctgtaaacagtataaacaaaatccagcaacttgtcaacaaaataaaactaaatattgtgcaaagagatgaaatggagttttcaaagcacaatatattgtggtgagtgaaaaatgtgaaaatcgaagaaatgggataggaataggctttaaagcatctttaattagttataattttttggtgaatcaacatcctgtggttcaactgcttcttttcattgaaagcggaggaaaatgttacttataatatagtagaaaattgaaaagatattttctctgttcttcaggtgcttcttaaaatgtatctaaattgggatttttcgcagtctttttctgtaagtcagtgataaaaatcttgaaaaaaatttcaaaagatgatataataccaaattgtaagggttatcaaaaggtaactcaaaaactatttttaaaaaggagagtcaaactatggcttctaaagatttccacatcgtggcagaaacaggtatccacgcacgtccagcaactttgttggttcaaactgctagcaaatttgcttcagatattactcttgaatacaaaggtaaatcagttaacttgaaatcaatcatgggtgttatgagccttggtgttggtcaaggagcagacgttgtaatctctgcagaaggtgctgacgctgatgatgctatcgcagctatctcagaaacaatgactaaagaaggattggcttaaaaatatgacaaaaatgctaaaaggaattgcagcatctgacggtgttgccgttgctaaggcatatttgctcattcaaccagacttatcatttgagactgtttcagtcgaagatacaagtgcagaagaagctcgtttggatgcagctcttgaagcttcacaaaacgagctttctcttattcgggagaatgcagtagcaagccttggtgaagaagcagcgcaagtttttgatgcgcatatgatggttcttgctgaccctgaaatgattggtcagatcaaagaaacaattcgtacgaaaaaaatcaatgcagaagctggcttgaaagaagtcactgacatgttcattgcgatctttgaaggaatggaagacaatccttacatgcaagaacgtgcagcagatattcgtgacgttaccaaacgtgtccttgccaacttgcttggtaaaaaattgccaaaccctgcttctatcaatgaagaagcaatcgtggttgcgcatgacttgactccatctgatacagcacagttgaacaaaaagtatgtaaaagcttttgttacgaatatcggtggacgtaccagtcactcagctatcatggctcgtacacttgaaatcgcagctgttcttggtacaaataacatcacagaacttgtcaaagaaggcgatgttttggctgtttcagggatcactggtgaagtagtgatcaaccctactgaagaacaaattgcagagttcaaagcagctggtgaagcttatgctaaacaaaaagctgaatgggctctccttaaagatgcgaaaacagtgactgctgatggaaaacacttcgagttggctgccaacatcggtacacctaaagacgttgaaggtgtgaacgataatggtggagaagctgttggtctctatcgtacagaattcttgtacatggattctcaagacttcccaactgaagatgaccaatatgaagcctacaaagcagttcttgaaggcatgaatggtaaacctgtggttgttcgtacaatggatatcggtggggataaagaacttccttacttcgaccttcctaaagaaatgaacccattcttgggttaccgtgctttgcgtatttctatctctgaaactggtaaccaaatgttccgtacacaattgcgtgccttgcttcgtgcatctgttcacggtaaattgcggatcatgttcccaatggttgctttgttaactgagttccgtacggctaaaggtattcttgaagaagaaaaggctaaattgcttgcggaaggtgttgctgttgcagacgatatccaagtagggatcatgattgaaatcccagctgcagcaatgcttgcggatcaatttgctaaggaagttgatttcttctcaatcggtacaaatgacttgatccaatacacaatggctgctgaccgtatgaacgaacaagtttcatacctttaccaaccatataacccatctatccttcgtttgatcaacaacgtgatcaaagcggctcacgctgaaggcaaatgggctggtatgtgtggtgaaatggccggtgaccaaactgccgttccacttcttgtcggaatgggcttggatgagttttctatgtcagcgacatctgtccttcgtacacgtagcttgatgaagaaactcgacacagctaaaatgcaagaatacgctaaccgtgctcttactgaatgttcaacaatggaagaagttcttgaactttcaaaagaatacgtgaacgtagactaagaattcaacaagactaagacaaatctgtcttagtctttttttacattgttcataaaaatgttcattttattcgtaataaactagttagtaataaaaatagtgatttaaatgttcggtttttgtttgattttcctcgtatatatagtataatcgtaagtaagataaggaggatgaccaaggaaggatcgaaaaggttcgggaaagaaaatggaaaaaattttcctgataattttacatgattttacaggaatcaacttgaaaattaagtgattttatagtagaataatatcaaatagaaaacgctttcaaaaaagcaaagaggtgagtatatggatagaagcacagacttatggacatttggaagaggggataatttccatcttcaagagtacttaggagctcacaaggaaacaaggggagaacaagaaggctttaccttccgtgtttgggctcccaatgctcaggcggtggatctgattggtgatttcactgattgggaagctcgtaaaattccaatggttcgtaatgaaggaggcgtctgggaagtcttctgttccgatgcaaaagagggagatatatacaagtatttggtgactcgacaaaatggtcatcaggtgcaaaaaatcgatcctctagcgttatggatggaaaaacgacccaatacaggatctattattaagaccattccagagaaaaactggaaagatggtctctggagagcacgccgtaaaaaacttggttttaaggaacgacctgttaatatttacgaggttcatgcaggatcttggaaacgaaatgaggatcacagttcctacaccttcaaacaactaaaagatgaactcattccgtatctggtagagatgaactacacccacgtggaatttatgccagtgatggcccatccattgggcttgagttggggctatcagctcatgggatattttgcactcgagcagacttatggtagcccagaagagtttcaagacttcgtggaagaatgccacctcaacaatatcggagtgatcgtggattgggtaccaggacatttcattatcaatgatgatgccttggcttattatgatggaacaccaacctttgaataccaggatgaacatcgtgcccataactacggatggggagccttgaacttcgatttagggaagaatcaagtccagtcattcttgatttctagtttgaagttttggattgatacctatcatttagatgggattcgggtcgatgctgtgagcaatatgctctatcttgactacgatagtggtccatggacaccaaatattgatggtggaaacctcaactacgaaggcgttcatttccttagacggttgaatgcgattatcaagaacgaacacccagatgtcatgatgattgcagaagaaagttctgctggtcaaaagatcacgggtcctgaagaagaaggtggacttggctttgactataaatggaatatggggtggatgaatgatatccttcgattctacgaagaagatcccatctaccggaaatttgactttaacctggtaacctttagtttcatgtatgcattttctgaaaacttcttactaccattttcacacgatgaagtggtgcatggtaagaagagtttgatgcataagatgtggggagatcgttacaatcaatttgctggactccgtaaccttttgacttatcagatttgccatccaggaaaaaaattactctttatgggttcggaatttggtcaatttttggaatggaagtcagaagagcaactggaatggggcaatctagaggatgaaatgaatgctaagatgagtcgtttcacttctcagctcaatcatttctacaaggaacacaaggaattgtgggagattgatgatagctttgatggcttagagattattgatgcagataaccgggatcagagcgtcttgtctatggtccggaaaaatcgtaagggcgatcttttggtgtgcgttttcaatatggcaccagtagaacgcaaggactttacgattggtgtgcctgtatcagcggtctatgaagaaatttggaatacagaattagaagaatggggaggtgtctggaaagagcacaatccgacagttcagtctcaagagggactgtggaaggattatgaacaaaccttgacctttactttgccggctttaggagctagtatttggaaggtgaaacgcaaggtgcgtaagacaaaatctaaaacatcagataagaaatgacgatcggttgactctatgggagtccaggctttaaaaagaggaagtagtcaatgaagaatgaaatgctcgctttaattcttgccggtgggcaaggaacacgtcttggaaaattaaccaaaaacatcgcaaaacctgcggttcaatttggtgggcgctatcggattatcgattttgcgctatcaaactgcgccaactcaggaattcacaatgttggtgtgattacacagtaccagccacttgcccttaacagccatattgggaatggttccagctggggcttggatggaatcaatacgggtgtgtctattctccaaccttattcagctagtgaaggaaatcgttggtttgaaggaactagccatgccatcctccaaaacatcgactatatcgacagcatcaatccggaatatgtcttgatattatctggggaccacatctataagatggattacgatgatatgcttcaagcgcacaaggataataatgcaagcttaactgttgccgtcctagatgtacctttgaaggaagcaagccgttttggaatcatgaatacagatgccaataatcggattgtcgaatttgaagaaaaaccagctgaaccaaaatctaccaaggcttccatggggatttacatctttgactgggctcgtctccgcaatatgttggttgctgctgaaaagagtgatatcgatatgtcagacttcggtaaaaatgtcattccaacgtatctagaatcaggcgaaagtgtttatgcttatgaattcaatggttattggaaagacgttggtacgattgagtctctttgggaagccaatatggaatatatcgatccaaataatgccttggatagtcgcgatcgtcactggaaaatctattcacgcaacctcatttctccaccgaacttctttggggaacatggccacgtcgaagattctcttgtcgtcgacggttgttcggtagacggtacagtcaaacactccatcttatcaacagaagctcaagttcgtgaaggagcagttgtcgaagatgctgtcgtgatgagcaatgccattatcggtaaaggagctgtcgtgaaacgcgcgattatcggggaaggtgcagtcattgcagaaggtgtcgtgattgatggaacagaggaagtacaagttgtcggttacaatgaaaaagtgggggtagcaacagatgaagattgataaatattcagccattttaggaaatacagttgggtatcatgatatgtccactttgactagccatcgtccggtagcatccctaccgtttgatgggaaataccgcttaatcgacttcccgttgtctagtcttgcgaatgctggtattcgtagtgtttttgggattttccaacaagaaaatattagttcggtctttgaccatattcgttcaggtcgtgagtggggcttgtctactttattgagccactattatctcggaatctataatactccagttgaaaatacaacggtagggccagaatattaccaacaattgttgacctatttgaaacggtctggttccaaccaaacggttgctttgaactgtgatgtcttgatgaatattgacctcaatcaagttttccacttgcataatagcgttgaccgtccgattacagtggtttataagaagttgcatcttcaaaatatctctgaagtcaatgctgtcttgaaaattgatgaaacagaccatgttacagagcaaagactttttgatggcaaggatcctgacgaagtctacaacatgtcaacagatgtctttattgtggacactccttggttgattgaaaaaattgaagaagaagccaagaaagaatacccacaaaaattgcgctatatcttgcgtgatttggcagtggaatacaatgcttttgcctttgaatatacaggctaccttgccaatattcattcagtggaatcctactaccatgcaaacttggatatgttggaaaaccaaaaattcatgaagctcttttcaccaaatcaaaaagtgtatacgaaagtgaagaatgaagaaccaacgtattattccaagacttcacatattaaatcgtctcaatttgcttcgggtagtattgtagaaggaaccgttgaacgctccgttgtttcacgtcgggtacaccttcatcaaggttcagaggtccgcagtagtcttctcttccctggtgttgtgattcatgaaaatgcaatcgtcgaacatggcatcctggataagggtgtcgaagtggctgctggtgtgacgattcgtgggacagaagaagcacctgtcgtggttaaaaaaggaacgattgttacagaggatattgtctaatgaaactattatttgttgcagctgaaggagcaccgttttctaaaacaggtggtttgggagacgttattggcgctcttcctaaatccttagcgaaaagtggtcatgatgtgcgcgtgatcctcccttactatgatatggtagaggctaagtttggagatcaaatcgaagatgtcttgcattttgagaccaaggttggctggagaagtcaatatgttggtgtgaaacgcattgtgcgcgatggagtcaccttttactttattgataaccaacattatttctttagaggtcatgtgtatggtgacttcgatgatggcgaacgctttgccttcttccagctcgcggccttagaaacgatggaacgagttgacttcattccagatgttcttcatgcccatgattaccatacggcgatgattcctttcttgctgaaggaaaaataccgttggattcaagcttatcatggaattaagacagtattgaccatccataatttggaattccaaggtcagttcgacccaggaatgttgtgggatcttttcggagttggatttgaacgctatgcagatggaacacttcgatggaatgattgcctgaactggatgaaagccggcattctatatgctgaccgtgtgacaactgtttctcctagctatgcgcatgagattatgactgctgaatatggttgtggcttggatcagatccttcggatggagtctggcaaggtgaccggaattgttaacgggattgatgcagatctgtataatcctgaaacggatccactcttgacgtatcacttcagtctctcagatctttcaggtaaagcagctagtaaacgagctcttcaagaacgtgtcggtctacctgttcgcgatgatgttcctttgtttgggatcgtctctcgtttgacacgtcaaaaaggctttgacgtggtggtagaagagttgcatcaactcttgcaaaaggatattcagattgtcttgctcggtacaggagatcctggatttgaaaatgcctttgcttggtttggtcaagcctacccagataaactttcagcgaatatcacatttgatgtccaattggcccaagaaatctatgcagcgtcggatgtcttcttgatgccaagccgttttgaaccgtgtggtctttctcaaatgatggccatgcgttatggaacccttcctttagtgcatgaagtcggcggacttcgagatacggtccaaccgtataatgctgttgatggaagtggaacaggctttagtttcaataatttgtctggctattggtttaactgggcagttgatgaagccttggctgtctactacaatgacaaacaggcttggtatggtctccaagagcaagctatgacgcgtgacttctcatgggatacggctagtcaacgatacaatgatttgtaccaatccttataaatagatctataatacaaacgcctttcgaggcgttttttgtgttgctttcttcctataaagaaaacggtttatttttttgagttttagagcttgctaaaatagaagaaaaaagataagataggtaaaggtaaaaaatcccgggaaggttcttatttctggaaaggatcccatcctctctaaaaataatcaggtccctgctcgagggttaaatattactatataggaattttaggatgaaaaaagcgaaacaaacgtttgaaaaaatgaccaaatattcgattcggaaattaactgttggtgttggtccggtggccattggagcctttttattaggaggaagcctgttaggagctcgtcctgtcaaagcagatcaggtgaccctacctgctcatgtgcacttaggatatgtgacagaagaggagctaactgctgaagaaaaggcacaggtgattcatgcaatccctgaagagtatcaaaatgaagatactttctatctcgtctataagaagaaggaagcaactcagtcggttcttcctcaaacaggaagtcaggaagttgcccttttggggctaagtctagccactgcttcctttgcggtcctcttactctctaaaaagcaccgaaagaaggttatgggcgtccttttgattggagccatgggacaaagtcttctacttccagttgaagttgcagccctacaaaatcgagtcttgcgcgcctataatcaggatcttgcgatcacatcgagcaaagatcttgaaaatggcgtgattcatattgacggctatgattatgttggctatctgcgctacccgtcagtccaaaagacgagcttacaagagccaaagactatgcaggaaacgaaaacttctgtagaaggaacgatcaaaacaagtacagggattctaccagtggaaccacaagcgcgtgtgaccccagaagtcgctccagcctttcctcaagttgaaaaaccaagcctggaagtctctactgagcctgtaccatttgaaaccgtccaccaagctgatcctacattagccaaagggcaaaccaaggtgctgactgctggccaaaatggggagaggaccatattgacggaagtgggtgtggtagatggacaagaagttcgcagagtagttgaaagcaaggtcactaaagaaccagtttcacaaattcttgctgttgggacaaaagaagatgcccaaccaacccctcaacccaatccttctccagttgtaacggccaaagggacacaagaagaaggtcatgtcggtgaagctcctgttcaaccagagaatccagtctatacaggcgtagtggaagctaagggaacacaagaagaaggccatgttggcgaagctcctgttcaaccagagaacccagcctatacaggagtggtggaagcgaaaggaacacaggaagaaggccatgttggcgaagctcctgttcaaccagagaacccaacctatacaggtgcggtagaagccaagggaacacaggaagaaggccatatcggcgaagcccctattcaaccagagaacccaacctatcaagtaacggaagggacagtaacagagacagaaacggtaatccttccatatgaaacagagtatgtaacggatgccaatcgttacaccgatgaagaaagccttcttcagaaaggtgaggccggtagccaggaaattcgccgtgtttataagacggtcaatggtgagaaaaatggtgagcccctcagcacgacaactgaaacggtaaaagctcctgtgacagaaagaatcagtcgtgggaccaaggcgattgaaggccaaacagaggaagttgcttttgaggagattccatttaagacggtaaccgaacaagatgccaccttgctaaaaggatcagaaacagtttctcaagccggtaaaaatgggaagaagaaaatcaccaaggtttacaagactattaagggggtcaaaacggcggatgctcctacgatttccgaagaagtggtagaacaagcgcaagatcaaatcattaaaaaaggaacaaaggaattagataagccaaccttgaccttgaccaatcttgatcaggaagtgttgaagcgcagtgctaaagctacttatcatttggacaaaccagagggtgtgaccatcaagtctatccaggcggtattgaaaaagggcaatcaagtggttaaaactctgcccctttcagagactgatttagcagttgctttagcagacttagactattacaaggattatacgctcgcaacgaccatggtctatgatcgtggaaatggggatgaagaagaagttctcaaggaagaaccgttgaggattgatcttaaaaaagttgaaatcaaaaacatcaaggaaaccagtctgattagtgtggatgaccaaggacttgagacggatagcagtctcttgactgaaacaccgtctgatgtgaagccatactacttaaaggttaccacccatgataataaggtcacaaaactagccgttgataaaattgaagaagtgacggtagatggcacgaccctttacaaagtaacagccaaagctcctgatctcatccaacggactgcggacaaccaatttagtgaggaatatgtccactatattgcgaaacccaaagcacatgaaggtgatgtctactacaatttcaacgaacttgtaaaagccatgcaagccaatccgactggtacctttaaactgggtagcaatatgaatgcggctaatgtccagccagcagggaaatcctatgtgaccaatgccttcaagggaattttggaaagtacggatggaaatacatttgccatccataacattacaagaccattatttgggaacatcgaaggtggctcggttaagaatctcttgcttgaaaatgtcaatattgacctacctgggacagatcgagtagcaccaatcgcaggtgtcattaaaaacaatgcaactgtcgagaacgttaaagtaacaggaagtgttgtcgggaacaatgacgtagcaggaattgtcaataaaattgatggcagtgggaaggtcagcaatgttgcctttatcgggaaactgcacgctgctgggaacaaaggtggctatctagcgggtgtccttggcgagaactggaaaggtgtcgttgaaaaagcttacgttgacgctgaaatcactggtaacaaagccaaagcggcaggtctcgtttattcctctcaaaatggtgctaataactacacggtcggtaaagaaggggtcctcagaaattcagttgctaaaggttcaattgaactcaaagaagcggttcaatctggtggattactagggaccaactgggccttggggactattgaagacaacatcaccatgatgaaagtcaaaactggtgagatggtcttcggacactcggatatcgatgcagatgattacttcacctattcaagaactaagcgcaattacagtgtggaaggtgtgagtgaagggaaaaaatcctttaacaattcccgcaaaatcccaagtatctcgctggcagaagctgagcagaaaatcgaagcaatgggaatcactgctcatacattcaccagcagcaaaccgattgaagttacgctcaatcaccttattagcaaagacgatcaatacaaggccatcactgcttatgatgctactcgtgagctagcttatcgcaatattgctaaattgcaacctttctacaacaaagaatggattgtcgaccaagggaataaactggctgcaacgagtcctctcttgaccaaggaagtcttgtctgtaacagctatgaagggcaatgattttgtcacggaactagctgatgctgatcacattctgatccattatgcggataagacaaaagatatctttagcattgcaccgaaagactctaaagttaaacaagtcaaagagtacagtgtagcagagctcggtgaagtggtctacacaccgaatatggtggacaaagaccggagcgatctcattagtgccatcgtagggaaattaagtcctgtcgaattgcaatcggatccaatctacacacatcttggtcgaacaggtcctaacaaagtcaatgcgattaagaacctttacctcgaagaaactttcaaagaagtcaaggataatctggctcactttgtcaaacaactggttgaaaaccaagatcatcagttgaatacagatgaagctgccaaacgggccctcatcaagaagattgaggacaacaaggcggccgttctgttggggctttcttacctcaatcgctattatggagtgaagttcgatgatgtcaatctcaaacagctcatgttgttcaagccagacttctatgggaagaatgtcgatgttttagatcgcttgatcgaaattggttcaaaagaagattatatcaaagggactcgtacccacgatgccttccgagaagtcgtggctaaatcgactctttctgggaacctcaatgacttcttgaagtacaatatggagctctttacaagtgagccagacttgaacgattggttcatcaaagcaaccaaagacaatgtctatattgtggagcctgagacgaccaatccagcgttcgcatctgctaagcatagagcctatgagggcttaaacaatgatgttcatggtaaaatgatcttgccactcttgaacttaaaagatgcccatatgttcttgatttcaacctacaataccatggcttatagttcctttgagaaatatggcaagaacacggaagcagaacgaactgccttcaaagctgaaatcgataaggtggctaaaggacaacagaattaccttgatttctggtcacgtctagcaacggataaggttcgcaatcaactcttgaagagcaataatatggttccaacacctgttctcgataaccaaaactataaaggtattagtacagaccgttatggccataccaacagtggcaaagatgtcgctccaatccgtgaattgtatggcccaaccgatcgttaccatgcaacagattggcggatgggagctgtcgctcgaatttacggaaatccttataaagacgactctgtcttctttatggtgaccgatatgatcagtgactttggggtttctgcctttacccacgaaacgacgcacgtcaatgaccgcatggtttacttaggtggttggcggcatcgcgaaggaaccgatatcgaagcctttgctcaagggatgctccaaacaccatccgtatccaatccaaatggggaatacaaggccttaggtctcaacatggcctatgaacgtcctaacgatggaaaccaatggtacaataccaatccaaatgatctcacttcacgcgaggacattgatcgctacatgaagggctataatgacaccctcatgcttttggattacctagaaggagaagctgtcctcaataaaggtagtcaagacttgaacaatgcttggttcaagaaggttgataagcaataccgaggggctaacaccaagaatcaatttgataaggtgcgtcctttgagtgatgaggaaaaagccatcaccttacatacagtagatgacctcatcaccaataacttcatgaccaatcgtggtcctggaaacggggtctataatccatcagactttggttcagcctatgtgactgtaccgatgatgacggggatctatggtgggaacactagtgaaggtgctcctggagctatgtccttcaaacacaataccttcagaatctggggttactatggctatgaaaaaggcttcttagggtatgcttcaaacaaatataaacaagaatccaaacaagcaggtcatgcgactctaggggatgattacatcattcaaaagatttctgatggaacattccgtacccttgaagactggaagaaagcttacttcaatgaagtggtgaccagtgccaaaaatggacttcaggctattgaaattgatgggactacttatagcacttatgatgacttaaaacaagcctttgcaactgctgttgaaaaagatcaagccagcttgaagaatggtgttgtcaaatttgacaatacggtttcactgaaagaaaaaatctttaagaaactacttcaacaaacagacagtttcaaaacgtctatctttaaataatcgaattctcttatctgctgagcaggtgagagttttttttagaagaaaaatgaatagaggtggacaaagcgtctaaaaattaaaagaaatcagtcgtagataggaaaaattatcatattaaaaaaataacgtaatttcattaaaacgcttacttttctaggaaatatttgactattatgtcttttaggagtaaactaataaggtaaaatttataaaaggagaattcatcatgaatttaacatttttaggtctttgtttagcctgctttggtgtatcactggcagaaggtttgatgatgagcagcctattgaaatctgcgtctcgtcaaccagaaattattggtcaattgcgtagcctcttgattcttggtgttgcctttgtcgaaggtactttcttcgtaaccttggttatggccttcattatcaaataagcacttctattttagaaaaggaggtgtcaaaacttggaagaaagtatcactccaacgataactcttggacctgtaacttttaatttgaccctacttgctatgaccttgattgctgttttggtggtttttggctttatttattgggccagccgtaaaatgacgatccgaccaaagggcaaacaaaatgtgctggaatacgcatatgactttgtcgtaggcttcaccaaaggaaatattggggaacattatataaaggactattccttgttcttgtttgttctttttctatttcttttagtggccaataacattggattgatggctaaaatcgaaacgaccaatggttacaatttgtggacatcaccaaccgctaacctgggttatgactttgccttttcatttttgatcaccttaatcgcccatgtagaaggaattcgccgacgtggtgtgaaggaatatttaaaggcttttgtgacacctggatttatgacccccatgaatattttggaagaattaacgaactttgcctccttggcacttcggatcttcggaaatatctttgcgggtgaggtattagcaagcttgctcgtgaacttatcacaccaagctttctattggtatccatttgcctttattggtagcatggcatggactgcattttcaatttttatttcatgtatccaagcctatgtgtttaccatgttgtcatcaatctatattggtaagaaaattaatggtgaagagtaagtagaggaggagtagaagaatgcatgtatcaatgagtgaaattattggtaactttattctcattgctggttccttcctattattaatctttttaataaagaaatttgcatggaacaatatcaatggaattttagaagcgcgtgccaaaaagattacagatgatattgatggagcagaatcagctcgtcaaaaagctgaggaactagcaagtaaacgtgaagaagagttggcaggtagccgcaaagaagctgcgtctattgtcgaaaatgcaaaggaaactgcagaaaagaacaaatctcagatcctttcagaagccactcaagaagcagtacgtttgaaagaaaaagcgcaacaagaaattgcgcataacaaagaagaagcattgaacagtatcaaaggcgatgtggcagatctcactgtcaatcttgccagcaaattgttgagtcaacagctggatgctgaaggtcaacgccaactgatcgatcgctatcttgatgaattaggagaagcctaatggacaaaaagcaactgatggtgattgagaaatatacccagccttttgttcaattggtctttgaaaaaggagaacaagatcttgtctttgaaaaattgacccaaatcaagggcatttttgaggagactggacttgctaacttcttagctcatatcggtgtagaggatgaagagaaagcaaaaagtctaagactttttcaaccctctgattcacaattactcgaccatttgattgaagtggttattctcaatcatcgtgaagccttattttatgacattgtaacgatttgtttggatcagattcaactgttgagcaacgcatttgtcgtcactgttacgacagttgctggtttggatcctgttcaagagcaaaagctagtacccattatcgaaagaaaatttgggattcaagttcgctcgatccaacaaaagatcgatccagatttaattggtggctttgtcgtgacagccaatcataaaacgttggataccagtctcaaacaccaattgcaagttataaaatctaaattgaaatagaaagtggtgtgaattttggcgattaacgcacaagaaatcagcgctttaattaagcaacaaattgaaaatttcaagccaaactttgacgtcactgagacaggtgttgtaacctacattggtgacgggattgcccgtgctcatggtcttgaaaatgccatgagtggtgagttgttgatctttgaaaatggctcatacgggatggcccaaaacttagaaacaacggatgtcgggatcatcattttgggtgatttcacggatattcgtgaaggagactctgtccgtcgtacaggtaaaatcatggaagtccctgcaggggatgccttgattggtcgggttgtcaacccacttggccaaccagtggatggtttgggtgagattgtgacagataaattccgtccagttgaaacaccagctcctggcgttatgcaacggaaatctgtctcagaacccctacaaactggtttgaaagccattgatgccctcgttccaatcggacgtggccaacgggaattgattatcggggaccgtcaaacagggaaaacttcgattgccatcgataccatcttgaaccaaaagggtcaagacatgatctgtatctatgtggcgattggtcaaaaagaatcaacagttcgtacgcaagtagaaactcttcgtaaatacggagccatggattatacgattgtggtaaccgcttcggcttcccaaccgtctccattgctctacttggcaccttatgccggggttgccatggcagaagagttcatgtataacggtaaacacgttttgatcgtctatgatgatttgtcaaaacaagccgtagcctaccgtgaattgtcccttcttcttcgtcgtccaccaggacgtgaagccttcccaggggatgtcttctatctccacagccgtttgttggaacgttcagctaaagtttcagatgaattgggtggtggctctattacagctcttccaatcattgaaacccaagcaggagatatttctgcttatatcgcaaccaacgtgatttcgatcacagatggacaaatcttcttgcaagatagtttgttcaatgctggtattcgtccggccattgatgcaggttcttctgtatcccgtgtagggggagctgcccaaatcaaggctatgaagaaagttgcgggtactcttcgtatcgacctcgcttcataccgtgaattggaagccttcacgaaatttggtagtgacttggatgctgcgactcaagcgaaattgaaccgtggccgccgaacagttgaagtcttgaaacaacccgttcatgaaccattgacagttgaaaaacaagtcgtgatcttgtatgccttgactcatggtttcttagatagtgttccagtagacgatattcttcgtttccaagaagagttgtttgattactttgaagcacattataatcaaatctttgagacgattcgttcgacacatgatcttccagcagaagaagaactggatgcagcccttacagaatttgtcaaccagtcaaatttcaaatagaaataggagtggaagatggcagtttcattaaatgatataaaaaataaaattgcatccactaaaaatactagtcaaattaccaatgccatgcagatggtgtctgctgctaaactcggaaaatcggagcaagcagccaaggattttcaggtttatgctgctaaggtacgtaagttactaacagacttgctccatggacatgaaacagaaaatgctaagtccaatcccatgttggtgagtcggccggtaaaaaagacagcttatatcgtgattacatccgatcgtggtttggtcggaggctacaatgcctccatccttaaaaccatgatggaaatgaaggcagaataccatccaactggagatgactttgaagtgatctgtattggaagtgtcggggcggatttcttccgtgcccgtgggattcagccggtttatgaattgcgtggtttgcctgatcaacctagctttaaggaagttcgtacgatcatttcgaaaacagtccaaatgtatcaggaaggcttgtttgatgagttgtacgtctgttacaaccatcacgtcaacagtttgactagtcaaatgcgggtagaacagatgcttccgattattgatttggaccccaatgaagcagatgaggattatgtattgaatctagaattggaatctagtcgagatgccattttggatcaattgctccctcaatttgctgaaagcatgatctatggtgccattattgatgctaaaacagctgaaaatgctgcggggatgatggccatgcaaactgcaacagacaatgccaagaaagtcattgatgaattaacgattcaatacaaccgtgctcgtcaagcagcgattacacaagaaattactgaaatcgttgctggtgctagcgcccttgaatagttgtcggatacaattttatatacaaaaacagatgctcgaaaaagaacttttgagcagtagaaattacttagaataggagaatgacatgagtttaggcaaaatttctcaggtcgtaggtcccgtcgtagacgttgccttttccgttggagataaacttcctgagatcaataatgcgcttgtagtctataaaaatgaccaacaaaaatcaaaagtcgttcttgaagtagctttggaacttggtgatggggtcgtacggaccattgccatggaatcaactgatggtttaacacgtggaatggaagtcttggacactggtcgtccaatctctgttcctgtcggaaaagaaaccttgggacgtgtcttcaatgttcttggagataccattgacttggatcaaccttttgctgaggatgctcctcgtgactccatccacaaaaaagctccatcctttgacgagctctctacttcagaagaaattcttgaaacagggatcaaggttattgacctcttagccccttatttgaaaggtgggaaggtcggactcttcggtggtgccggagttgggaagaccgtcttgattcaagaattaatccataatattgcccaagaacacggtggtatttctgtatttaccggtgttggggaacggacacgtgaagggaatgacctttactgggaaatgaaagaatctggcgttattgaaaaaacagccatggtctttggacaaatgaatgagccacctggagcacggatgcgtgttgccttgactggtttaaccattgcggaatacttccgtgatgtcgaaggtcaggacgttctcttgtttatcgacaatatcttccgtttcacccaagccggatctgaagtatcagcccttttgggacggatgccatcagccgttggttaccaacctactttggcaactgaaatggggcaattgcaagaacggattacgtcaaccaagaaaggttctgttacatccatccaagccatctatgtgccagccgatgactacacagacccagcgccagcaaccgcttttgctcacttagattcaaccaccaacttggaacgtaaattggtacaattggggatttaccctgcggtggacccattggcatcaagctcacgtgccctttctccagaaatcgtaggagaagaacactatgcagtagcttctgaggtcaaacgcgtccttcaacgttaccatgaattgcaagatatcattgctatcttggggatggatgaattgtctgacgaagaaaagaccttggttgctcgtgctcgccggatccaattcttcttgtcacaaaacttcaacgttgcggaacaatttacaggtcaacctggttcttatgtaccagttggagaaactgttcgtggctttaaagaaattttggatgggaaatatgaccatcttcctgaagatgccttccgtggtgttggatcaatcgaagatgtgatcgccaaagctgaaaaaatgggattctaagaagaggtgaaagatgagtcaaatgaacgtccaaatcgttacaccggatggactggtttatgatcatcatgccgcatttgtatctgtcaagacaattgatggtgaattagggattttacctcatcatatcaataccattgcggttttggctgtagaccaagtaaaggttcgtcgtgtcgacgatgacaaacatattgattggattgcagtcaatggtgggattatcgaagtagctgataatgtcattaccattgttgccgattctgccgaacgtgctcgagatattgacattagtcgtgcagaacgtgccaaactgcgagctgaaaaagcgattgaagaagccaaagatcagcattcggttgatatggaacgtcgtgctaaaattgctcttcaacgcgccattaaccggattaatgtcggaaatcgtttataagatattcaaaataaggtggaggtatgtcctcaccttatttttgttgggagagaatcaaaagaagaaagtacggaccaaatatggtataatagctgtatgattcaaatgatttttaatctttcaagccatctattgtttatcttttttgcctattacctattgatgaacctggttcaatgggaaaagtttttaaaagtaagtgctgaaaatgcggttaaaatccgttttttgatcttgatgatcagcgtcggaatcggctatctagccagctcattttttatcagtgtctatgagatgagtcgacagatttttattggccaattctagccacattttataaaaaatatggtatgatagaaagcgtgactttaagaaattggagaacaatcccgtatggaaaaaataatcgttaatggtggtcataatcgactggttggaaccgtcaaaatcgaaggagcaaaaaatgctgtccttcctcttcttgctgcaacagttctagcaagcgagggtgtgacaaccttgaaaaatgtacctgttttatcagatgtctttacaatgaacaatgttgttcgtgggttgaatgcacaagtaaccttcaatgaagaagacaatacggttgtcgtagatgcgcaagcaaaattatcagaggaagcaccttataagtatgtgagcaaaatgcgtgcttctatcgttgtcctaggtcctgtcttggcacgcaatggccatgccaaagtttccatgcctggaggctgtacgatcggtagtcgtccgattgacctccatctcaaaggtctggaagctatgggagctgaaattacccaaacagccggctatattgaagcaaaagcagatcgtctcaagggagcacacatctatatggacttcccatcagtaggtgcgacacaaaatattatgatggccgcaaccttggcagatggagtcactgtgattgaaaatgcagctcgagaacctgaaattgttgacctagctctcttgctaaataaaatgggggctaatgttaagggagcaggaactgagaccttgaccatcgtcggagtggagagcttgcatggtgcaaaccacaatgttgtgcaagaccgcatcgaagctggaacctttatgattggggcagccatgactggtggagatgtcttgatcgaagatgccatttgggaacacaaccgtccgcttctatctaagatgcaggagatgggggtaacggtaaccgaagaagaaaatggaattcggattcaatcggatatcagtaagctccgtccagtgacggttaaaacccttccctatccaggattcccaaccgatatgcaggctcaattcacagccttgatggccatggctaaaggtgagtctaccatgattgaaacggtttttgagaatcgcttccagcatttggaagaaatgcgtcggatgggcgttcactcagacattatgcgggatacagctcgtatcgttggaggagaaagcttccaaggtgcagaggtcatgtcgactgatttaagagcgagtgcaaccttggtcttgatgggcttggtagtagaaggagaaacgaaagtcagcaaattaagtcacttagatcgtggttattatcaattccatgagaaattggtggcactaggtgcagacgtgaaacgtgtagaggaagaagacgatgaaaactaatcttcgctatgttggaaaacagctaggaattgtcctcctgttggctgtgattggaatcatcatttttgcagttggtttggtcattggctatggagtgattggagatggaaaaaatccatggtccattctctctccggacacttggtcagagatcattggaaagctaacaggcaaataagcttttaactaaaattgagtaaaaaggagagcagcgaatcgagtcaatgacccatctagcgctgctcttttttggagagatgtatggcaaaacaaacagtaagcaaacgaaccaaacaaacattagcaggttttgtggtggcaacggccctagctattgggggctattattttaatcaaccgacggtaaaagaagcgacagatcaggttgtttcggtggtgactagtagccaacaagaaacacctagtaaagagttagctagctctgtactaacgaaatctgcccgttcacaattgggaaatgacttggaatggaatggtgctggagcctttgtagttaagggaaatcgcacagatctggatgccagcgtggctagtcaaccctatgcggataacaagacaaaagaagtgaatggaaagacagtaccgacggttgcgaacgccattatgaccaaggcaactcgccagtacagagatcgtgatgcaacaggtagtggcctaaccgattggaaaccagcaggttggcatcaggtccacaatctgtccggtgagtatgaccatgctgtggatcggggccacctattgggctacgccttgatcggtaatctcaaaggtttcgatgcttcgacaagcaatcccaaaaatatcgctgtgcaaacggcttggtccaatcaagccaatgatcctcattccaccggtcaaaactactacgagaccctggtccgaaaagcactggataagaacaagcggatccgctatcgggtcaccttgatctacaaccagccagaagatttgattccattggggtctcatattgaagccaaatcgagtgatgggagccttgagttcaatgtttttgttcccaatgttcaaagtgggattagtctggattaccagacaggaaaagtaaccgttcatcaataagctggaaagcgcagttatttaagttatttttaagaatggggtgttacaattgcataccttctttaagagaaaggagaatgtatgagaaccatttttcgatttttcagaggaatccttcgcatggcttggagtcttttttggggatttttctggaccattgccatcagttttctcgttctagtggggatcatctatttcacagattctcctagttctggtatggatgggtttggacgagctgcccaaaaggttgtctatcaagtcggcaatttatttggtgatcagggctttgcatcgcgctttgggatggcgcctagctcacagaccacgcaaacggacaatcatgagcatagtggcgcccgctgggaaaaagcggaagctacggtctatttggatcccaatatcagtcaaacttttgtaaaagcttatcgggatgctattgaggcttggaaccaaacaggagcctttaccttcaagttggttacaaatgaaaaagaggctaatgtggtcttgacggaaatggataacgcatcggtttctgctgcaggagagactgcctctcagactaatcttttaaccaaccgcttcacccacatcacagtgcgtctcaatcgccattatcttttaaattatgtctataactatagttatgatcggattgtcaatacagctgagcatgagctaggccatgcgattgggctggaccacactgatggagaatcggtcatgcaaccggctggttctttctacagtattcaggatacagatgtggaagcagtccggcaattatacaaggaagaataagttttaaaatactttctaaaagttctgagcctcaaggggctcaggatttttttgatggctcgtctttccttgtttaatctgaaaaaagatagtaaaataaggacatgattattttacaagccaacaaaattgaacgctcttttgcaggggaggttctttttgataatatcagcctgcaagtggatgaacgggaccggattgccctggtcggaaagaacggagccggcaagtctacgctcttgaaaattttggtgggagaagaagaaccaacttctggggaaatcaataaaaagcgcgacctttccctctcctatctagcccaggatagccgctttgagtcgtccaataccatctacgatgagatgctccatgtctttgatgacctccgtaaaacggagaaaactttgcggcagatggagcttgagatgggggaaaaaactggggctgacttagaaaaactcatgcaggattatgaccgtctatcggaagaattccgtcaggcaggtggcttcacctatgaagcagatatccgcgctattctgaacggctttaagttcgatgagtctatgtggcagatgaagattgaagagctatctggtgggcaaaatacccgtctggctctggccaagatgctcatggaaaaaccaaatctcttggtactggacgagccgaccaaccacttggatattgagaccatcgcctggttggaaaactatctggtcaactatagtggggcccttcttattgtcagccacgaccgctattttctcgataaagttgctaccattacactggacttgaccaagcattctttagatcgctatgtcggtaattactccagctttgtcgagcaaaaagaacaaaaattgctgaccgaagccaagaactacgagaagcaacaaaaagaaattgctgcgctggaagactttgttaatcgcaatttggcgcgggcttcgactaccaagagagcccagtctcggcgcaagcagttggaaaaaatggagcgtctagacaaacctgaagctgggaccaagtctgcccatatgaccttccattctggtaagacatcgggaaatgtcgtcctgacagtagaagaggcagccgtcggctatgacgatcaaatcctctcagagccgatcaatctggatatccgcaagatgaatgcggtcgctattgtaggaccaaatgggattgggaaatctactcttatcaagtccatcattgggcagattccttttatcaagggggaagtccgttttggggccaatgtcgaggtgggttactatgaccagacccaaagtaaactaacgccacacaacagtgtcttggatgagctctggaatgactttaaactgacgccagaagtagaaattcgcaatcgcctgggagcctttcttttctctggcgatgatgtcaagaaaaccgttggcatgctgtcaggtggagagcgggcacgcctgctattggccaagctttctatggagaataataacttcttgattcttgatgagccgaccaaccacttggacatcgatagcaaggaagtactggaaaatgccttgattgattttgatggcaccctgctttttgtaagccacgaccgctactttatcaatcgggtagcgacccaagtcttagaactctcagaagagggctcgaccctttatctgggagactatgattattatctggagaaaaaagcagagttagaggcccttgctgcagcgcaagcagaagctgagcctgcttcttcaacggaagaagtcaccagcaatgattattacttgcaaaagcaaaaccagaaggaactccgtaaaatcacccgtcgcattgagcaattggaagcagagatggaagagctggatcaaaaaatccaagccatcaccgaaaccatgcatagcaccaatgatgcagaggatttggtccaactgcaaagcgagctagaccaactgactattcaacaggaagctgtcatggaagagtgggcagatctgtcagagcaggtggaatagattgtctcgttgaaaagttgttttagaaattttacaactgagagtatgaattctctatggttacagtctttaggattcctgaataaggaagaaggaagaaatgaataaaaatgtatttagtagatccttgggaatttggttattggcgatagggttgctagtttatagctatttctaggcaataccagggctacattcccttgaacctcctcaaaaattgtataagcagggcttggtgtataggtcgcaagatagtgaggatattttgtcagtgaaagtattggacatagatctaattccagttaaaacagatgaggcccaatattatttaattaagcatgactatggtgttacggctatgaagacaacttttaatactgtctattcaatgcttaaaatgaaagacagatttcctaatcaagaaatcccactagaatcaggtggattctatctaagtgtcaaagtgattcctgaggtagagaacagacgaaaaggcggcatgaagattcatttgcgttttgaatatgctgacaagaaacaagattcgattctctttagaagacaattattacgtctcaaggatcttgtggaatatttaaacgaagaatacaacttaggattgaaagtggattttagactcctagggtaatcaacggagagtaagatgaacaaaaagatatttgttaggacactatttgactggtgtgtcgttgttgttttatcggttgtttgctattttgatatacagccagctattcatatgaatacgaacccggaaaaattgtatcagcaaggctatgtttataaggcagagaatagtgaagatgtattagcgataaaagtgctggatattgaccctaacccgattgagagaaagaataatacttattatttagttaaacatgaatatggggtcacagccatgaaggtcattaaaggaagcgtaaacaaactacttgagatgaaagaagcacttgctcctcaagaaaatcctttggaatcttctgacttttatcttcatgtacaggtgttgcctgaaattcgcaagaaaagaaaaaaaccagatatagtcattattagccaagaatttaaggacatcattcaagagagatttaaccaaagcgacctttcaaaaggcggggatactgtcgataagacgcatcttcttgatttgatggacgacaaaggggtagctcattttctcgtgaaacctgtattggtgggacttgttgcagtttttttcttcatcaatacaatcagaagaattttatatatacgtagacagttcatgctctttaatacattgtttccagcttatacggatcaaccggagaaattagtgaaagatgcggactatagtgacaaaaaactggaacttcttgtgcaccagggcgtcctcgttttttatggcatggattttgaaatactgccagtagatgacattgaagaaataaaactttttagggtccatagaaaaagtttttatcgctacaagatgaagattatcttttattcaagtcgccggccttatgtttttgaaattaataaaagtaatatggaggcctactatcccttcatcgactatttaagaagtcttgcaccaatcgttgttgaagatggatggaagatgaattacaggtaaagggattggggacgataatctacaaataatcctaaaaagtgactcgaggcaggtgatggtgcttcgagtctttttctcatctaatgttatggtttagaaaaatgagaaaggagtcattgattctgatgataagtgactatgtagaaaaccgtttaaggctaataaagcaaacaggctatattattgtgtctaatagttatgatttggaatatacctcacataaagcatttgaaaatctaactagttaggatggaatcatgtcaattaaacattagatatataaggcctgtttcgttattatgaggattctttacaatttagagttaaaaaactgttgagaagattctggaattctatctatataaaaaacaccccaaaagtcagattttatctatataacttttggggtgtagttcattcggtgtttttttagttgttatttttttcttctgctttaacttctttcttttcttcctccagttgcttttgagtgctcttgagttctttttttagggagaagccctttgaaaaattaaccaaggtcatgacaaatgcacccaagaggacacagagcaggatcagaatgatcaaaggcaatttaaattggaccaagaggaaatttacggtaaccgattgcatgtttgcaagggaaataccagcaatcaataaaattaaaagtaataaagcaatgtagtgtagattatttttgttcatcattatctccttattgttcagcaggggccttgcttttcacatcagcgtactcttccggctgctctaggcttagaatctcctcataagccggtagggaaaggtccttgccatatttattttttaaagcagtgctcactagtcgataggccaaattggcatttcgggacaagataggaccgtggaagtagctgccaaagacgttcttgtaatgaaccccttcgcacccatcttctttgttgttcccatttccatagacgaccttacccagcggtttttcatcctcagccaagaaggtccgaccttggtggttttcaaaaccataataggtttcgttaaattcttcgttatggattttgatatcaccgatatagcggttgttgacttggttgagcgtatagtggcccataatgccaagtccctcaatgcgtttgccagaagcttcaatgtagtattggcctagaagctgaaagccaccacagatagcaaggactacaccatcgtcatgaatgaagcgttcgaggtcttcttttttatctggtagatcctcggatacaatggtctgttcgtagtcttgcccgccgccgaaaaaggcgatatcgtaggcatcagggtcgaaccggtctttgagagagacgatatcaacagtgacatgggctccaagcttttccgcaacgtacttgagcatgaggatattcccattgtccccataggtattcattaagttgccatagagatgggcaatacgcaggctgtagggatactgtgcctgatcagaagattctagggaagtataagtcattagtgcatctccttttcaatcaggtgttcttgggccaaaagttcacggaattctagcatggctgtataggtagctaaaatgtaagcgtgaggggtttcctgttgctggatgcgttggaaaacctcttttaattcagccatttctgtgatcttttctgcaggatagccagtgacccgaagtcgccgagcaatctcagagtggcgcaccccgccagcgttgatctctggaatgtccatctgagtgatttgctcgaagtcggcatcccaaatccagctggtatcaatcccatctgcataattggcattgaggagaaccgacaagctaaagggataaggggctagtttgaacatttcaatggcttgggtcgcaccaaccggatttttaatcaggactagggtacattccttatccccaatcttaaaggtttcctggcgaccaaagacagcgcgactgcgatcaaatccttgcttaatcacttcaggttgaaccccaaagaatccagcaacggaaacagctgctaaggcattatagatgttgtagagaccaccgatattgatgtggtaatcttgcccttggatccggaattgggaagagcgatgggttaaagagaggaggtccgatacggcataggtcagagggggccggtggaaaccacagtgctcacagatataatctcccaggttagcataggtattgagcttgtacttgaggatgttgtgacaatgcgggcacaggattccttccgtattgtaatgggctagttgtggctctgatttgtctgtatcaaatccataatattggatcggattggataaggtctgactattaaagagcggactatctccgtttaacagaaccgtcgcagttgggaccttgtgaatggcatccaaaatcatctggtaagttgtatagatctccccatagcgatccatctggtcccggaaaatattggtgaccacaaaaaggctgggcttaatataatcacaaatacgagagaggctggcctcgtcaatttcaagtaccgcaatcggtcgatttgatttcgaatgtttggcccgtatgaaggtcgtcgtgattcccgagatcatattggccccgcttggattggtcaaaataggtccaaaagcttcttggagaataccaactgttagcgcagtggtcaaggtttttccatttgtccctgtaatcacaacaatctcatagtttttggccagttgactgagaatatctttatcaaatttgagggctactttacctggtagggttgatccccgccccattttttctagaatagagccggaaagctttcctgccagaaggcccaaggttgtatttatcttcataaatcatattttatcataaaaagcatcagaaggttacagaaaaatctgttgaaacgtgttataataagatgatgtcttttagagaagtggtaggtatgagaatatgaatattcaacagttttcaaatccacaattttggaccagtttgttcccaaattggtggagtgttattatcaatatcatcgatattgccctggtgtcttggttgctgtattttttgatcaaggccatcgtcgggaccaagatcatgattttggtgcgtggagttattatctttttcttggctcaatttttagccaatttttttggtttaacgactatttcttggctgatcaatcaagtgattacctatggggttatcgccctggttgtgattttctcccctgaaattcggattggcttagagcgtctaggtcgggcgacagaattttttacgacgagtgaagtcagtcaggaagagaaaatggtacaggcctatgttaaggcagtggcttatatgagcccacgtaagattggtgctttggtagctattcaaggggccagaacccttcaggaatacatttccacagggattcctctggatgcagatatttcaggagaattgctgattaatatcttcattcctaatactcccttacacgatggtgccgtcattgttcgcaatgataaaatcgctgtttcttgtgcctacctgcccttgacggaaaacactgagatttcaaaagagtttggaacgcgtcaccgtgcagctattggcttatctgaagtttctgatgcctttacctttgtggtatcagaagaaacgggtggcatctctatgacctacaacggaacttttcgtcatgatttaactttagaagagtttgagtcggaattgagagccttcttggttcctgaagagaataaaacgattagttggaaagagcgtctatttgggagggtaacaaaatgagatcgaaaaaagaatttctttatgttttcgcctccgtcttattgtcctttatcttatttatcaatgcgtcttcctttaattttcaaaataatagtagcgctagacaagtgagttcagagacctacaccaatacattgaccaatattccaattgatgccaagtacaatgacaagacatactttgtcagtgggttgacatcagaggtaacggtctttctgaaaggttcaaaccgggttgctcttgctagtgagatgcaaccgggcactcggaagtttcgtgtggtagcagatcttcgtaaggccaaggaaggcaccgtagaagttccgttgattgtagaagatcttccgtctggtttgacagcaaccgtagaacctcagaaagtttctgtaaaaatcgggaagaaagcgaaaaaatcgtttgcggtcagggccacaatcccggacaatcaaattgtggatggaataacggtatcggatattactcttgaaaccaccaaggtagaagtgaccagcgatcaagaaaccttgagtcgcattgatcatgtcgaagctgtcttcccatccagtgagatcatcagtggaaattatagtggaactctttcattaaatccggtagatgctcaaggagatggtctaccaggtctggtaaatccgagtgaaacacggattaaagtaaccacaaagactagctcgtctacgtcaagctctagcagttcgtcgtcgacctcttccagttcaagtaattagaaagtaaaaaaggtaatgaagaatgggtaaatattttggaacggacggtgtccgtggagaagcaaatgtagaattaacgccagaattggcttttaaactaggccgtttcggtggctatgtgttgagccaacatgaagaagaaacacccttggtatttgttggacgtgatacgcgtatttctggtgaaatgttagagcatgccttaattgctggcctcttatctgttggaattcgcgtctacaagttgggtgtgattgcaacaccaggtgtcgcttatctagttcgtacggaaaaagccagcgccggagtgatgatttctgccagccacaatccagccttggataatggcatcaaattctttggtggtgatggcttcaaattggatgacgatcgcgagcttgaaattgaagccttgcttgatgcggctgaagatacgcttccacgtccaagtgcccaaggtttaggaacggtcatggaatatccagaaggcttgcgtaagtatcaagaattccttgtatcgacaggcgttcaactcgagggcatgcacgtagtcttagatacagcaaatggtgcagcctctactagtgcccgccaaatctttgcagatttgggagctcaattgactgtcatcggtgaaaacccagatggtttgaacatcaatgatggggttggttctactcacccagagcatttgcaagagaaagtcaaagaagtaggtgcagcgattggtcttgcctttgacggagacagcgatcgcttgattgctgtggatgaaaatggagagatcgtagacggcgataagatcatgtacatcatcggttcttatctttcaagcaagggcttgctcgaaaaaaatacgatcgtcacaaccgtcatgtccaatctcggcttccacaaggcattagatgcgaagggaattcaaaaagaaatcacagctgttggagaccgttatgtggtcgaagaaatgcgcaaatcaggatacaatcttggtggtgaacaatctggtcacgtagtcatcatggattacaacacaacaggtgatggtcaattaacaggcgttcaattgacaaaaatcatgcaagaaaccggcaagaaattatctgaattggctgctgaagtgaccatttatccacaaaaactggtcaatatccgggttgaaaatagcatgaaagacaaggcgatggaagtacccgctatccgtgaaatcattgaaaaaatggaagcggaaatggcaggaaatggccgcatcctcgtgcgtccaagtggaactgaacccctccttcgtgtgatggcagaagctccaacccatgaagaagtggactactatgtagatactattgctgcagttgttcaagcagaaatcggactttaaccttgtaaaaaacatggctcgcaaataggcgagcagaggaggtatatatgaaacaggttcgtcaaattgtatgggcacttaccttagtgctaacgattctattcacagttggtttgactaaaacaattcatgctgcagaagtctcatcatatacacagacagcacgtctaacgaaagatggtaacacgctaacaaatgggagcaaggtgttgacaaatgaaaaattgtcagcaagtatttatttagcctttccagattcgcaaactattcaagctggggataccttaactcttagtttgccaaaagaattagccctctacacagcactggaattcaatgttcttgaggaaggtcaatcaaatggtcagacggtggggaaagctgtcgttgatacagctaagaaaacagtgaccgttacctttaatgattatttcgcatctcatccactcaacaaacgagttgctcttcattttgatgtaaaagtagactcagaagtagttacaaaaacttctccaatccagtttaaactaggaaatacagatttttcattgaattatgaaaaaactgctggagaagctggagactatgagatgaaatacggttaccaagataagtctgatccaaccattatcaaatggcggattctcttaaatgctcgccaagatatgcttcgtggaatggtcattaaagaccaattcggagatggcttaacattggttgaaggtagcttacgcgctgttcgttatgctcctgtagaaggtgggattaagaacgaagctcagatattaagtctcccagttctggataactttactaaaaaagctgttttcaataagaatgcagatggaaagatcactggttttacaattgaatttggtgataattacaattggccaatgtatattgaatattctacgaaagtggcacctggaacgaaagtaggcgatattgtccataatacattaacatggaaggcaaccaatttcccagcaccgcgtagtttaacccgtgaagtgcgattggaaacaggatctggcgaaggattgggtgagaaagaacaaacgccaccgacacctagctcaacctcctcatcaagttctagttcttcatcaagctcatcatcttcaacgagttctagttcttcatcaagttcatcatcttcaacgagttctggttcttcatcaagttcatcatcttcaacgagttccagttctacatcgaactcaacatccacatcaagttcttcatcgaaatcatcttcatcttctgttaaagaagaagccccaaaacctggtaagaaaaaagttcttccaagtacaggtgaaaagatgacaccggtggttcttgtcatgggtgtcttcctagcagttctatcggttggtattttacgtgtaagaaaagattcctaaatctattcataaaagatcagacctttgtctggtctttttgtgtagactcgatttgaaaaatcccctatttcgtggtaaaatagggctaatgaatttatagtaatcgaggtattagaagtggcttttggagataacggaaaacgtaaaaaaacaccatttgaaatgatcacgatggtcgtcattgtgattatgttgattgtaacggttggtgcaatctttgcaaccgcaattggtgctctttcttactaagacgcacgcagaaataaaggaaatcatctatttatgagtatgtttttagatacagccaagattaaggtcaaggctggaaatggcggcgatggcatggtggcttttcgtcgcgaaaaatatgtccctaatggcggaccttggggtggtgatggaggtcgtggtggcaatgtcatctttgtagtagacgaaggcttgcgtaccttgatggacttccgttataaccgacatttcaaagcccaaaatggggaaaaaggaatgaccaaagggatgcacggacggggagcagaagatctctatgttcgggttcctcaaggaacgaccgtccgagatgctgagacgggcaaggtcattacggacctagttgaaaatggacaagagtacattgtcgcccacggtggccgtggcggacgtggaaacattcgttttgccactcctaaaaatccagccccagagatttctgagaatggggaacctggtcaggaacgcgaactcgaattagaactcaaggtcttggcagacgttggtttggttggcttcccatcagtagggaaatcaactcttctcagtgtcatcacttcagccaaaccaaagattggggcttatcattttacaaccatcgtgccaaacttgggcatggttcggacaccgtcaggtgaatcttttgctgtcgcagaccttcctggattgattgaaggagctagccaaggggtcggactcggaacccagttccttcgtcacatcgagcgcacccgggttatcctgcatgttattgatatgtcagcgagcgaaggacgcgacccttatgaagattatgttcaaatcaataaagagcttgaaacctataatcttcgtttgatggaacgtcctcagattatcgtggcaaataagatggatatgccagagagccaagaaaacttgaaagagttcaagaagaaattggcagccaattacgatgagtttgatgaactgccacagatcttcccgatctctagtttggcgcatcaaggtttggacaacttgttagaagcaacagcagaattgttagacaaaacgccagaattcctcttgtattcagaagacgaaatggcccaagaagaagtctactatggctttgatgaagaccagccagcctttgacatcagtcgggatgacgatgccgcttgggtcttgtctggtgaaaaacttgaaaaactctttaatatgaccaatttcgatcgggatgaagcggtcatgaaatttgctcgtcaattgcgtggaatgggtgttgatgaagctcttcgtgcacgtggggcaaaagatggcgatatcgtccggatcggtaaatttgaatttgagtttgtagattaagggtggtcccgagcggatcaaggattccaaataagaaatgaggctttttcagtgggagataaaccaatatcttttcgagatgaaaatggaaattttgtttcagcagccgatgtttggaatgctgaaaaactagaagaactctttaatacgctaaatcctaagcgcaagttgcgcttacaaagggaaaaattagcaaaagaaaaccagcagaagtaaatagacttggagaatactatggcaaaaacaattcatacagataaagcacccgcagcaattggaccttatgttcaagggaaaatcgtaggcaatcttctctttgcaagcggacaagttcccttgtcacctgaaacaggagaaatcattggtgaaaccatccaagaacaaacagagcaagtcttaaagaatattggggctattttggaagaggccgggacagacttcgaccacgtggtgaaaaccacttgtttcttaagtgatatgaatgactttgtaccttttaatgaggtctataaaacagtctttaccacagagtttccagctcgatctgctgttgaagtagcacgcctgccacgtgatgtgaaggttgaaattgaagttattgcggaaatcaaagcctaataaccattcaaagacaaaaagacagagtggagagcaggaaactgtaggccactctgttttattttgggaggagaaaatgacagaaagtaagattcaactggtcatggtaacggggatgagcggtgcgggcaagaccgttgccatccaatcgtttgaggatttgggttactttaccatcgataatatgccaccggcgctcttgctgaaatttattgagctcatgcgccacagtcccgataacaataaattagccgttgttgtggatatgcggagccgttcttttttcaatgaaattcgcaccattttggatgaattggacaatcaagaagacctggatttcaaagtcttgttcttggatgccactgacagtgagttggtagcacgatacaaggaaacccgtcgtagccatccattagcggcagatggccgtgtcttagatgggattaccctagagcgcgaactcttgtcccctttaaaaaatatcagtcaaaatgtagtggatacgactgagttgacacctcgtaatttgagaaaaacgatcgcagaacaatttgccagtcaagataatcagccagattttcgggttgaggtcatgtcatttgggtttaaatatggccttccgatcgatgctgaccttgtctttgacgtgcgtttccttccaaatccctactacaaattggaacttcggaatttaaccggtcaagatccagctgtctatgattacgtcatggatcaccctgaatcagaggacttttatcgtcacctccatgacttgatcgttcctattttaccgtcttataaacgggagggtaaatccgttctcaccattgctatgggatgtaccggtgggcaacaccgttcagtagcctttgcagagcgcttagcgcatgatttagaaaaaaattggcaggtcaattgcagtcatagagataaggacagacggaaagaaacggtgaatcgctcatgagaaaacctaaagtaaccgttattggaggaggaacagggatttctgttatcctcgatagtctgagaaagaaaccggtcgatattactgccatcgtaaccgttgcagatgatggcgggagttcaggtgaattgcggaagaacatccaaaaattgacaccacctggagatcttcgaaatgtgctggttgccatgtcagatatgcctcgtttttatgagaaggtctttcaataccgctttgcagacgatgatggacctttggccggacaccctttgggaaacttgatcattgcagggatttcagagatgcaaggctcgacctataatgccatgcagttgttaactaaattcttccatacgactggcaagatctatccttccagtgatagtcccttgacccttcatgccgtttttcaagatggaaaagaagtggtaggagaaagccacattgccaactacaccggcatgattgatcatgtttatgtgaccaatacctttgatcaagagcgcccaaaagctagtaagaaagtggtggaagctattcttgaaagtgatatggtcgtcttaggtcctggttcgctctttacctcgattcttcctaatttgatgatcgatgagattgggaaagccatccttgaaaccaaggcccaagtagcctatgtgtgtaatatcatgacccaaagaggagaaaccgagcatttcacagatagtgaccacgttgccgttcttcataaacatttgggagagaagttcatcgataccgtccttgtcaatatcaatcaggttccggcagcttacatgaacagcaataaatttgatgaatacttggtgcaggtagagcacgattttaaggggttgcactcgcaagttccccaagtgatttcttctgatttcttaaagttggtcaatggaggagcctttcatgatggtgaaaaagtagtcgaagagttgatgcagatcgtgcaggtgagaaaatgagttttacggttcgtgtaaaagaagaattattgtctctcaagcgatttgaaaagagtgaattggctgccattatcaagatgtctggaagtcttgggatttcaatggggggcttgacgctctcggtaacaacagaaaatgccaagatcgctcgccatatctatgaattgttgcatcatttttatgaggccaaatcggatattcgccaccaccaaaaaaccaatttgaaaaaaaatcgtgtttacacagtattcttggatgaaaaggtggaagagattcttgctgacttgcatttggcagatgccttttttgggattgagacaggcattgatgccagtgttttagaagatgaagtagccagtcgtgcttatcttcggggggcttttctgtcgagtggttccatcaaggatcctgaaaaagggaagtaccagttggaaattcattctgtttatacagaccacgcggaaggaattgcccttctcatgcaaggatttttactagatgcgaaaaccatcgagcggaaaaaaggagtggtgacctatctgcaacgagcggaagatattattgattttctaattgtggtagaggccatgcaagccatgcaggaatttgagtccatcaaggtcatgagagagacgcgcaatgacctcaatcgggccaataatgccgaaatggccaatatccagcgcacagtcacagccagtatgaaaaccattaataatattagtaaaattgtggatacaatcggtctaggaagtttaccaagtgatctgcaagaagttgcctatatccggatgaaccatccagattattccatccagcagatcgcagatagcttgcaacaacctatttcaaaaagcggtgtcaatcaccgcttgcgtaagatcaataagatcgcagacgatttagacaaataaaaaaggccaaaggccttttttattataaactagttgagtgcgttggttggactttcttatctggatagatgtagttgatggcattgtttacggctgttggagcttccccaagacctgtagcgatgagatcaatctttccttcgtagaagcagcagtctccacaggcataaattccaggaaggctggtttcttgtttttggttcaccttgattttatggcgttgcaattctacaccccattctttcaagtttccgatagaagatttaaagccatagttgacaaataagtgatcaatcgggataagttcggtttcatcggatttaacttttgtgatttcaagatgagtggcatgaccattttcgccaatcaagcggctaggaacaaatggtgttttgatgctgacagaagattgtttgagttcttcaacgctatgttccaaggcacggaagttgtcccgacggtgaatgattgtagttggagcaatcttgtcaaaagcaagagcccagtccacagcagagtccccaccaccaaggacggtcacttgctgtccttcatattgctggatatttgaaacatggtagtggacattatcgaagtcttcagccccctcgatatcaagagcacgtggtttaaaggcaccgccacccatggcaatgatgacggctttagactgatgcacttggcgagaagtagtgatagtgaagaggtcaccctctttttgaatatcctctacagtttcattgaggaagatcggtgtatcgaatcgtttgacttgctcgatcaagcggtcgcttaattcttcacctgttaaattggtaaaaccgggtacatcgaggatatttttttctggatagagaatggctggttgccctccaagttgaggtaaggaatcaatcagtttgactttaacttggcgcatattgccataaaaagcagcaaacagaccaactggtccgcccccaacaatcgtaatatcataaatttctgacatggtatctccttcagggttttctatgtttccattgtatcataaaataggaagaatgaaaaagtcggaaaaaagaaatggcatgaaggctaggaaggctagaaaagtttcaaaagatcttgacagcatctttaaagtgtgataaaataattaagattttaggcttgaagggagtgaaaaatatgtcaaaaacagtagtacgtaagaatgaatctcttgacgatgctcttcgtcgtttcaaacgtgcggttactaaagctggtactcttcaagaaacacgcaaacgtgaattctatgaaaaaccttctgtaaaacgtaaacgtaaatcagaagcagctcgtaaacgtaaaaaattctaattgaatacagaaacagacttcggtctgttttttgttttttctcatccatcaaagacaaaaaaaccgaccttctaactagaagatcggatctttttatctgattatttgtttgcaagcaagtcgcggatttcagtaagcaactcttcttgagtaggagcagcagcttcttcttcaacagcttcttcttttttaccaaggttttgtgctttttcagcagctttaacgataaagaagagaacagttccaatgacgatgaagttgattactgcgctcaagaagctaccgtaagcaacaccgttccatgacaattcagcaattttatcaacaccagcagctttcaaagctgggttcaaaataagtggtgtgatgacatcgttaacaagtgatgtcacgatggcaccaaatgcagccccgataatcactgcaacagcaaggtcaacaacgtttccacgaaggaggaaagctttcaattcttttaacatatcctatataatatgtcctttcataataattttttactatgatagtataacggaaaaatatgcgactgacaagaaatatgcccaattttttttaaaattagtgataaaggttgaaaatcttttcttttatgtgtgaaatcggtaggaaaaaatttacttttactaacttttagtataaaatataaagtgataatctatggtaaaatggaggcactgtttatggttgataaagagctgattgcagaaattaaaaacagtgtaaacattgttgaagtcattggagaagttgtttctttgaccaaggctggccgtaattttttaggcctctgtccttttcatggcgaaaagactccttcctttaatgttgttgaagacaagcagttttaccattgcttcggatgtggtcgctctggagatgtctttaagtttattgaggactaccgtggagtcgcctttatggatgcggtccagatcgtagcagaaaaagctggcattgcgcttcagtaccaagcaaggccggctcaaccaacgtctatcaatccaaaccaagaactttatgagattcatcaggaagctagtaagttttatcaggcgattttgatgacgactaagatgggggaagaagcgagaaactatctgcatgaacgtggtctgacggatgaggtcatccgacattttcaattgggcttagcaccagcagaaggaaattatctctatcgaaatctctctgagaaattctctgagaaagtgattaccgattcaggtttgtttacaatctcagatgctggaacggtttttgatgcctttcaggatcggatcatgtttcccttgacggatgatagtggacgtgtcattgccttttctggtaggttgtggaaaatgacggaggatggcagtcatcaagccaagtacaagaatagtcgcagtacgcgattgtttaataaaagctatgaactctatcatttggatcaagccaagacgagcgccaaaaagcaatatgaaatgtatatcatggaaggttttatggatgtcattgcagcttatcgagctgggatagaaaatgcggtcgcctctatggggacagccttgacaccagagcatgtccagcacctgtctcattttactaaaaaggttatcttgacctatgatggagataaggcagggcttgaagcaacagctaaggccttggatgtcttgcaggatctggagttggagatcgtccgtatcccagatcagatggatcctgatgagtacctcaaaaagacgtccccagaagatctagctaccctcttgaagaattctcggatcagtaaggttgaattcttgatgcactactggaaaccccagtatattgagaacttgcagtcgcaaattgagtttgtcgaaaagttggcaccgatgatcgcccagacgcgttctattacagcgcaaaacacctatatttataagttggccgatttattgccggactttgattacttgcagattgagcagattgtcaataatagtcgtttgcaacaacggcaggaggttcaaagtggtggacgatctaaaacatcgtatttttcagtggagctcttgccgaatcgtgggatgacgcgcttgatcaaggcggaaaatcatttattaagtaggatgaaggattttccaatggtcctcaatgattaccggttgcgacctgattttgcctttgacacgccggagttacagatcttgtatcaattgctctgtcaaaatggagaagtcacctctcaggatctatccgagcagcctgaaggggtccagcatgcctggtaccgcatgttagaagaagatttgccagaagagatagcagatggtgagttagaagaagtagaagcgacacggaatcgtgagcttcttcgcaaagaaagtcaacaaattggaaataaagtgaaggaagcttcctcaacaggggatgcggaaaaagctttattggaactcgagcgtttaatcgctcaaaaaagaagaatggagtaagaatggctaaagaacaaaaagatattacaacattggacgttcaaattgcagaatttattcgcagccacaagaaaagcggaactgcaacagatgatgaaattaatgaccaattggttattccattcacgctagatgcagatgggattgaagatcttttgcaacgcattcaagatgcagggatttcgatcactgataaagacggcaacccaagtgcgcgtgtgttgaacaatgaggaagagccagagttgtcagatgaggaattgcttggaagcaactctgctaaggtcaatgacccggtacggatgtacttgaaagaaattggggttgttcctcttttgaccaatgaagaagaacaagaattggctatcttggtggaacaaggtgatttagaagccaaacaacgtctagcagaagccaaccttcgtttggttgtatccattgcgaaacgttacgttggtcgtggaatgcaatttttggatttgatccaagaaggaaacatgggcttgatgaaggcggttgataagtttgactacaccaaagggttcaagttttctacttatgccacttggtggatccgtcaggctatcactcgtgctattgcagaccaagcgcgtaccattcggattcctgttcacatggtggaaaccattaacaagttggttcgtgaacaacgcaatctcttgcaagaattgggacaagacccaacacctgaacaaatcgctgaacgtatggatatgacaccagacaaggtgcgtgaaatcttgaagattgcgcaagagcctgtttctcttgaaactccaatcggggaagaagacgatagccatttgggagatttcatcgaagacgaagtgattgaaaatccagtagactacaccactcgtgtggttctacgagaacaattggatgaagtccttgataccctgacagaccgggaagaaaatgttttgcgtcttcgttttggtctcgatgatggaaaaatgcggactttggaagatgtggggaaagtcttcaacgtgacccgtgaacggatccgtcagatcgaagccaaagccctccgcaaactccgccacccaagcagaagcaaaccattgcgtgactttatagaggattaaaaatgtccagtggacatttttaacggccacccaaaaaccaaagagtggccaggtccgggggacctttttaacggtcgccaagaaatcaaaaagcgacccaggtccagtggacatttttaacccgagccgaaaaattcggaagcgaggaaggtctggcggacctttttaacggtcgcctagaaatgaagaagcgacccaggtccgggggacctttttaacccgagcccagaaattctatcgagagtaaatagcagaaaaaggaagtcatatggcatatacaactgagcaaattgaagaaattaaaaataaaatcttaaatgctttggaagaggtaatcgatcctgagcttgggattgacattgtcaatttaggtcttgtctacgagatccattttgacggtgaaactggagcaaccatcattgatatgaccttaacgaccatggggtgtccattagcggaccttctgacagatcagattcatgatgttttagcagaagtagaagaagtgacatcggtggatgtgaagttggtctggtatcctgcttggacggttgaaaagatgagccgttatgcacggatcgcacttggaattagttaaacactctatgtatcaaaacaaatcagaggttggggctcccctaacctctgatttgtttatcccattttttttgaacaagcatttacaaattcttagcaaattttcagatagagttgcaatcatcaaggggacaaggtataatagcataaatagaaaataaaggagatttacatgaatcagtatcctttggtctacttggaccatgtgacaaagaattatgggcatgaagttgctctcatggatgttagtttgaacatccaacctggccgtattattggccttttgggtcccaatggtagtgggaaaacaaccatcattaaattgattaatggtttgttgcaaccaagccttggaaatatctatattcatgggcaattaccatccccagcttctaaaaaagtggtttcctatttgccagatacaacttatctgaatgaaaatatgaaaattattgatgctattaactatttccaagatttttatgcagattttaatgtccaacgagcttaccaattgctcaacgatttgcatttgcatccaaatcaaaaattgaacagcctttcaaaagggaacaaggaaaaagtgcaattgattttggtgatgagccgtgaagctgacttgtatgttcttgatgaaccaatcggtggggttgacccagcggcgcgtgattatattttgctgaccattattcaaaacagacgtccaaactcttctgtcttgatttctactcacttgattgctgatattgagcaagttttggatgaggccattttcatcaaccaaggaagaatcctcttgcatgaaaatacgactgttatgcgcaatctacacggaaaatcaatcgatgagatcttccgtgatcaattccgtgtttattaggaggaacccatgtttggtaaattattaaaatatgaatttaaatcgacagctaagtggtatttattgatcaccctgatcgcactaggtttgtcagtgattacaggtgttattggtggaagtgctacaaatggttttgtggatatggaaaccaatagtatgcaaattataacggggactcttgggattctcatttttggaggagtcattggtctttatcttagtaactactatattattatccgtcgtttctattccaacttatacggacgtgaaggttacttgacttggacccttccagctagccctcatgcgatcattttgtctaaatttgtgggagctttagtagcgagtctttactgcctattccttctattttttagtggtttcatcacaattattgtgatgggtgctgtcattggacaagacatctctcctgtatttagtattatcgctgaggcttttagtcattctattgcttattggattatcgtttggtggatttttaccacagcttcagggatcttcctattttatgtatcgatcgcacttggccaactcttccaaaatcgtcgtggatttaaggctattctgtttttctttctcttgtgcattgttttaagtatcatcggtacagcagtcaatccattaaaagattcatatgctgttgggtctgcattggtttatggaaatattgatgaatttggacctaacttcattccaggtcttatctatgaagtcatcaagattgtttctatgtacttcaccattcactatatcagcaagtacaagttgaatcttcaataataacagtaaattgagcaaggagcttcccgatggaagccttcttgttcaatttttttcttttgcatttttggctacattttgatatactaattgtattcgttttggggtcgttacggattcgacaggcattatgaggcatattttgcaactcatctagcggatgtaaaacgccagttaaatataactgcaaaaaataataattcttacgctttagctgcctaaacaccagcaggcgtgacccgattcgaatcgctcgtgtttgatgacaggtcttaattatagcgagatacgatctagcttggtctaggagttagataagagattgatagactcgcaggtacagggcttgagttatgtgtcatgtagctgttaaaagaagacataacctatggttgtagacaaatatgctggcaggtgtttggacgtgggttcgactcccaccggctccatatttttatgcatggaagattactcaagaggcttaagaggccgtgttggaaacgcggtaggcgtgtaaaagcgtgcgtgggttcgaatcccatgtcttccgttgttgagacatcattgtgtagcagtggtgtttttttgtacaaaaaagagtcccaaaaatagacaagtgagggaggagaagaagtgattgcacagctagataccaaatcagtctatacttttatggaaagccttgtgaccataaaagactatgtccacgtggctaaaagcatggggtatgacgcattgggaatcatggatatagataatttatatggtgcttatgaatttatcgaagcctgtcaggcccacaagctcagccccttggtcggtttagaaattggactagaggtagagaatgaaacaattccgtttcggatgatcgctctgtcaacgaagggctaccagaatctgatgaagatgtcaaccgtcaaaatgatggggaagagcaattgggaggatgtgaagcacctaacagaaggagtagcagtcattgtcccagctccttttgctagtggagccttgccgcttggtctagattacttcatcggagtttttgcggatacgccggtccaagagtttagccaccctgtgattcctcttcataccgttcgattttttgaggcggaagatgtggaagccatgcagatgctagcagccatcaaggacaatcaaagcttgacagaaacagggccaattgatcctacaacggtccttaaaaaacctcaggatttaaagagtgattttgcagagcgctttccgcaagctatcacaaatttggaaaaacttgtccaagggattcaatatgacattgatacccagttgaaattgcctcgcttcaatcctcagaaaccagctgttgaggaactgagagaattagcccaagcgggtcttcttcgaaagaatttgaccagtccggtctatcaagaacgtctggagcatgaattagacattattcaccagatgggctttgatgattatttcttgattgtctgggaccttcttcgtttcggacggagtcaaggctattatatgggaatgggacgtgggtctgctgtaggctcactggtagcctatgccctagggattacagggattgatcctgtggagaagaacctcctgtttgagcgctttttaaatgtggagcgctacaccatgccggatattgatattgatattcctgatatctatcgaccagaatttatccgctatgtgcgagaccgttatgggagttaccatgcagctcagatcgtgaccttttcaacctttggggccaaacaagccattcgcgatgtctttaaacgttttggggtaccagagtacgaattgacctccattaccaagcggattgggtttagggatacactgacgacagcttatgaacagaatctagcttttcgacaagtgattcatagccgagcagaatttgagcgtggctttgaaattgctaaaagaattgaaggccaaccaagacagacatcgatccacgcggctggggttgtgatgagtgaccaggatttgacggatcacattcctctcaagtatggagaagacatgtttgtcacccagtatgatgcccatgcggttgaagccaatggtctgttgaagatggactttttgggtctgcgaaatttaacctttgttcagaaaatgaaggaagccgtctatgaaaagtaccaagaagagatcgtgattgaagccattgatttagaagatccagaaaccttggccttgtttgctgctggggataccaaggggattttccaatttgaacaggctggagccattcgcctcttgagacgagtgagacccaatcatttcgaagaagtggtagcgaccacctctctcaatcgtccaggggctagtgattacattgataatttcgtcaaaagaaagcacggccaggaaaaagttgacattctggatccagctattgaagaaatcttacggcctacttatgggatcatgctctaccaagagcaggtcatgcaggttgcccagcgttttgcaggctttagcctgggaaaagccgatattttacgtcgggctatgggtaaaaaaaatgcggctgaaatgcataagatggaagacgattttgtcgcaggtgctcttaaacttgggcatacggaagaaaaagccaaagaggtctttgcaatcatggaaaaattcgcaggctatgggtttaaccgttcccatgcctatgcctattctgccttggcctttcagatggcctatttcaaggtccattatccagatgttttctttgatgtcatgctcaattattcgagcagcgattatctgacagatgctctccagtttgattttaaagtcgcgccattatccatcaacaccatcccttacagagataagttccaggatcggaaaatctacttgggaatgaaaaatatcaagggactcccgagagatttagcgtattggatcattgataatcgtccctttgaaagtgtcgaagattttattttacgcctacccaatcagtatcataaattgcctttgttaacacctttagtggagcttggattgtttgacatctttgaaaaaaataggcgcaaggtgcttcacaatttgccgaatttgtttgtctttgccgatgagctaggtagtttatttgcagattctaactattcctggacagaagcagaagactttagccaggctgaaaaatatgagaaggaagaggccattattggtgtcgggctcagtactcacccattggttgcgattgggcaaacgagtccctacgagatccaaccaatttctcaactcatacaaggagagcaggtacgcattctcattgaggtacaaagcattcgaaccattcgaaccaagtcaggtgatctcatggctttcttacaagtcagtgataccaagaaaaaattggatgtgacccttttccctgaaacctacaatcgattttcctccttgataaaagaaggtggcttttattacttgacagggaagatacaagagcgtgatgggcgcttgcagatgattctagcagaggcacaactagcgaccaatgaaaagttctggatccagttgctcgatcatcgtcaggataaaacgattctttctatcttgaaaaaatatccgggcccatatcctgtgatattacgctatgaagacgagaaaaaaactcttcaattgaagggctataccgtccagaaaaacaaagaattggaagatgaattaaagaatctcgttatgaaaacgatttatcggtaaaaactgcgaaaaatacgagaattttagtcttctttgtgttataattacgtagaatgtaaaagaaaaaaaggagcaaacaacgaaatgaaacgtattgctgttttaactagtggtggagatgcccctggtatgaatgctgccatccgtgcagttgttcgtcaagcaatttcagaaggaatggaagttttcggtatctatgatggatatgcgggaatggttgctggtaaaattcagccccttgacgcctcatctgttggagatattatttcccgtggtggtaccttccttcattcagctcgttaccctgaattcgcacaacgcgaaggtcaattaaaagggatcgagcaattgaagaaacacgggatagaaggtgttgtcgttattggtggagatggttcttaccatggtgcgatgcgcttgactgagcttggattcccagctgtgggtcttcctggtacgatcgacaacgatatcgtcggaactgactttacaattggttttgatacggcagtcacaactgcaatggacgcgatcgataagatccgtgatacttcatctagtcaccaccgtactttcgttatcgaagtgatgggacgtaacgctggagatatcgctctttgggcagggattgcatctggtgcagatgaaatcatcatccctgaagaaggattcaagatcgaagatgttgttgagagcatcaaagaaggttacgcaaaaggtcgtacccacaacatcatcatcttggctgaaggcgtgatgtctgcagatgaatttggtaaagctttgaaagaagctggtgatgaaagtgaccttcgtgtgactgagcttggccacatccaacgtggtggttcaccgactgcgcgtgaccgtgttcttgcttcacgtatgggagcacacgctgttaaattgttgaaacaaggaatcggtggtgtagccgttggtatccgcaatgaaaaaatggtggaaaatccaatccttggtaaagcagaagaaggagccctctttagcttgacagaagatggtaagattgtggtaaacaatccacataaagctgatcttggtcttgccgagttgaaccgtagcttgtcttcaatttaattttatttcataaattcgttaaccttgtcttaaaaagacagatatatttaaaaaggagtcatatatatcatgaacaaacgtgtaaaaatcgttgcaactttaggtcctgcggtagaaatccgtggtggtaaaaaattcggtgaagatggatactgggctgaaaaacttgacgttgaagcttcagcacaaaacattgctaaattgatcgaagctggcgctaacactttccgtttcaacttctcacacggtgaccaccaagaacaaggtgaacgtatggcgactgttaaacgtgcagaagaaatcgctggtaaaaaagttggttaccttcttgatacaaaaggtcctgaaatccgtactgaattgttcgaaggcgaagctaaagaatattcatacaagactggtgaacgtatccgcgttgctacaaaacaaggtatcaaatcaactcgtgaagtgattgctttgaacgttgctggtgcgcttgacatctttgatgacgttgaagttggacaccaagtattggttgatgatggtaaattgggtcttcgcgttgtagaaaaagaccctgcaaaacgtgaatttgttgttgaagttgaaaacgatggtatcatcgctaaacaaaaaggtgtaaacatccctaacactaagattcctttcccagcacttgctgaacgcgataacgacgatatccgcttcggtttggaacaaggtatcaacttcatcgcgatctcattcgtacgtactgcaaaagacgttcaagaagttcgtgctatctgtgaagaaactggtaacagccacgttcaattgtttgcgaaaatcgaaaaccaacaaggtatcgaaaacttggatgaaatcatcgaagttactgatggtatcatgatcgctcgtggtgacatgggtatcgaagtaccattcgaaatggttccagtttaccaaaaaatgattacttctaaagtaaatgctgctggtaaagttgttatcactgcaacaaacatgcttgaaacaatgactgaaaaaccacgtgcaactcgttcagaagtatctgacgtcttcaacgctgttatcgatggtactgatgctacaatgctttcaggtgaatctgcaaacggtaaatacccacttgaatctgtagctacaatggcgaaaatcgacatgaacgctcaaacacttttgaaagaatatggtcgtttgaaccctgcttcattcgaacgtaactctaagacagaagttatggcttcagctgttaaagatgctacaaactcaatggatatcaaattagttgtaacattaactaagacaggtcacactgcacgtttgatctctaaataccgtccagatgctgatatcttggcattgacatttgacgaattgactgaacgtggattgatgttgaactggggtgttatcccaatgttgacagatgctccttcatcaactgatgatatgttcgaaattgctgaacgtaaagcagttgaagctggtcttgttaaatctggtgatgatatcgttatcgttgctggtgtaccagttggagaagctgttcgtacaaacacaatgcgtatccgtacagtacgttaatagacaattatatcttaaagccttgctggttggtccgaaaggattgaccgcgaggtttttctttttcctgtttagtatgacaagaattctcactaatgcttactttctcttttttaaagatcaaaaacatggtataataaataaaaaggaagggagacattcatgccaaggagagatttaattagaaatgtcatcattgtcggtgtactggttttggcactgattttgcttcgaatctttgtatttcatccatttagtatcaatgataaaatggccaatgcttctgtgaaaactggagatcttgtggtagcgactagaaatgctcaggtagatcgcagtgatttggtcttatacaaggtcggtggaaaagaataccttggacgtgtcattgccaaagaaaacgacgaagtcagctacgtagatgacgtcctctatttgaatggacaggcaacaccagaaccttacctgaacaaaatgctcaacaaacacttagctgctccaacgagtaatgggtattatacggatgatttcttcttatcagagttaaaagggaccaaggctggtcgtgtaccatccgatacttatcttgtcttaaatgataaccgtggagatacagaagatagccgtgagtttggttatatccataaaaatcagatcgaaggagtcgtgaatctacgtctctatcctctcaataaatttggatttataaaagtagaagaatagccgaaaggctatttttttttataaatatcaaaatgaactagtttttttccatttttgtggtaagatgttcattaaataattttttaggaggagaatgctatgcagtatgctttggaaattttaccaagtttgttaaagggagcaagcctcaccttgcaagtgtttgctttcgtattgattttatcgattccactaggaatcgttgttgcatttttgcttcaattgcgctcaaagatcctgcatggcctcctaacaatttatatctggatcatgcgaggaactcctcttttgcttcagttgatctttatttattacgtccttccaagtatcgggattcggattgatcggttgcctgcggctattacagccttcaccctcaattatgcagcctattttgcggaaatcttccgtggaggaattctcgccattccgacaggtcagtatgaggcggccaaggtcttaaaattgagttcatggcaaacaattcgctatattattttgcctcaggtggtgaagatcgttcttccaagtgtcttcaatgaagtcatgtccttgattaaagacacctccttggtctatgctctgggaattagtgatttgatcctcgctagtcggacggcagctaatcgtgatgccagtctagcacccatgtttttggcgggagctatttatttaatcctcattgggatcgtgaccatcattgctaagcgagttgaaaagaacttttcatattataaataggaggagaagcatatgttagaattaaaacaaatttcgaaacggtttggggataagcagatcttatcagatttcaatcttctcgttcctgaaaaacaaattgtcgccattgttggtccttctggggaggaaagactactttgcttcgcatgctagctggtcttgaaaccattgattctgatcagatcatctacaatggtgaaaacttgcctctggatgccttagaaaaacgaaatcttctcggttttgtctttcaagattttcaattatttccacatttatcggtcatggaaaacctgatcttgtcccctatcaagaccatgaatgtgactaagggagaagcaagtaaaaaagccatgagcttactggagcgcttggggctcgaacaacatgcggatgcttatccattctctctatctggtggtcagaagcaacgggtggcattggctcgtgctatgatgatcgatccagaaattattggctatgatgagccgacttcggccttggatccagaattgcgattagaagttgagaagttaatcttgcaaaaccgtgaactggggatgactcagatcgttgttacccatgatattccatttgcagaagcaattgcggatgttcttctcaaggttgagcctaaataggaggagaggatgaaacgagtaataccatggctgctaggtgtccttagtctcgttcttctgactgcctgtggacagacagtgagtgatcctaaagtggacaactggcaaaaataccaaaaagagcagtccatcacgattggttttgataatactttcgttcccatgggctttgaacaaaaagatgggagctacgctggttttgatattgatttggccaatcaagtctttgattcttatgggattcatgtcaactggcaacccattgattgggatatgaaagagacggaactgaaaaatgggaccattgatgccatctggaatggctattcggctacagatgaacgtcgggagagtgttgcttttaccaagccctatatgaaaaatgaacaagtcttggtcactaagaaagcctctgggatccaatcagtcgatgggatgaaagagaaacgattaggtgcccagaccggatcgtctggctatatggattttgaagccaatcctaaaatcttaaaaaataaggttaaaaatcaaaaggctacccaataccagagtttcaacgaggcgctgatcgatcttcagaatgatcggatcgatggcctcttaatcgaccgtgtctatgccaactattatctgcagacggaaggaattttaaaagactacaatgtctttcctgtcggttttgaaactgaatcctttgcggtaggagtgcgcaaggcggataaaaccttgaagaaaaaaattgatgaagcttttgtaaaactctatcaaaagggccaattccaaaagatctctaagaagtggttcggaacggatgtagcaacagacgatatcaagtaaaaaagctaggaaatgattcctagctttatattaaagacaaagttatctcaaaaactttccttaggtgagtacggacgtcagcgaacttctacgaagttccatgacttagttttgaacctaaggtttcaaaactcccgagtgctagaaacatcactgtttctagcacttttctcacagcggaaagttttggtatacttttgattcattttaaaaattagaaaatttttagaggatcaattaactttttttataaggtttggctgctctctcaagctaggaaatacttcctggctttttaatctgttttatttgtaatttgatggaaaatcttttgccaagtttcgtggcgacgccagagactggtatggatttgaccgtctagttcatagcgtatgagtttggttttttggctgatggactccagttcaaagttttggaattgaacttggtcgcttgcgagagcctctattaattctgccttgttgtgttcgtgaccggtatcgtcaatcaaggtataattatccgctagcaatgtatcaaactcttgcttagcatagaggcgtttttcgtaggttaagagtttcttttcaacgttttcgatcagctcatcttcaggaattgagctaggttccacatggacgtcaatgtcaaagactccaaattcttcttttaggagattctcgacttcttctgtgatcgcatggctttcatagactgaaagatcgggattcatctccaagacaacgtccagatagatattgcttccgtaggtccgtccgcgttggtatttcacacgcgcaatcttagggagttttaaaatagctttttcgtaatcttcgaggagactatcgtcaaagccatctgaaagactaaaggaagattccataaaaatatcgtaggctgttttgaggataaagaaggtgatgatgatggctacgattttatcgacaattggatagttaaaagcactagcagcgatcgcgatcgacgttccaagagatgtgacgacgtctgaaagattgtcttttgcggctgcttttaaggctttggatttggctcgtttggctaagcgaagattgtagaaataaacgcctagcatgacaagggctgaaaccactccgacgccagcaccgagtggatcaatgctaactgtttcattgctgaagatcttttggagggtatcgcgtaagacatcaaaaccgacataaaacataatgatggaggtaactagactagctagatcctcaattttccagtgaccaaacttgtgatcgcggtcagcaggttggcgagcgagacgaatcccgatgagcagggcagcattgctgatgatatctgataagttgttaaatccatcggctaccaaactagaggagtgaagcagatggccagtagctaattttgctgaagaaagtagtaaataggctaaaatactgatgatggcaccacgttcggccagttttaagttactgtatggtttttccaaaatttcctcctacaacctcggatatgaacctgttttctttaagctactattatatcgtttttggaagggaaattcaaatgagtccttttttaaaagaagctaggcaggttttgtggtataatagaacgattgaatgaatgaggagtatgagatgaatcctttattgaatggtatgaatgatcgccaagcagaggcggtccaaacgacagaaggtcccctcttgatcatggcgggggctggttctggtaagacacgtgtcctgacccaccgcatcgcttacttaatcgatgaaaaaatggtcaatccttggaatattttggccattacctttaccaataaagccgctcgggaaatgaaggagcgggcttatcagttgaatccagccacccaagattgcttgattgctaccttccactccatgtgtgtgcgcatcctccgtcgagatgcggatcatattggctacaatcgcaattttaccattgtcgatccgggtgagcagcggaccttgatgaagcggatcttgaagtccttgaatttagatccaaaaaaatggaatgaacggactattttggggactatttccaatgctaaaaatgacctgatcgatgaagtagcctatgctgcccaggcgggagatatgtacacccagatcgtcgccaagtgttatgaggcttaccaaaaggaactccgtcagtcagaagcagtggactttgatgatttgattatgctgaccttgcgtctttttgatcagcatccagatgtgctgacctattaccagcagaagttccaatatatccacgtggatgagtaccaagataccaaccatgcccaataccagttggtcaaactcttggcttcacgctttaaaaatatctgtgtcgttggggatgcggaccagtctatttatggctggcggggagcagatatgcagaatatcctggactttgagaaggattataaggaagctaaggtcgtcctcctagaagagaattaccgttcgaccaagacgattttgcaagcagccaatgatgtcatcaaaaacaatcgtcaccgccgtccgaagaatctctggacacaaaatgaagacggggaagagattgtctattatcgggctaatgatgagcaggatgaagctgtctttgttgctaaaacgattgaagagcttagtcgcgaagctggctacaaacatcgtgattttgcagttctctaccggaccaatgcccagtcacggaccattgaagaagcgctactcaagtccaacattccttacaccatggtagggggcaccaagttctacagccggaaggaaattcgggatgtcattgcttatctgaacttgattgccaacctcagtgacaatatcagttttgagcgcattatcaatgaacccaagaggggaatcgggacaggtacagtggataagattcgtgactttgcccaactgcaagagtcttcactcctggatgcttcagccaatatcatgctctcaggcattaaaggaaaggccgctcaagccatttgggactttgccaatctcattcttgattttagagaaagattggatcagctgaccattacagagttggtcgaagaggtccttgacaagacaggttatatgacggccctaaccaatcagggaaatttggaaagtcaggcccgcattgagaatatccaagagttcctatctgttaccaagaattttgatgaaaatggagagaccgtcgaagacgaatcaggtgtggaaaccttgagtcgtttcttgaatgatttggctttgattgccgatacggatgatggagcccaagaaacttcagaagtcaccttgatgacccttcacgcggctaagggattggagtttccagtcgtcttcttgattgggatggaagaaaatgtctttcctcttagtcgtgcggctgaggatccagatgagttggaagaagagcgtcgcttggcttatgtggggatcacgcgggcagagaaggttctcttcttgaccaatgctaactctcgtttgctttttggacggaccagctacaatcgtccgacgcgttttatcaatgaaatcagctcggatttattgacctaccaaggattagcccgtccagtcaacaccagctttaaggcttcttatagcaatggtgccggaacgacctttggaaaaggcatgagcctgtcacaagcccttcaagagcgcaagagacaagcatccccaagtgctctcacgtcatcaagcctaccttttggtaatagtaaccgttctagcgctaaagaaagcgtcgcttggtccattggtgatattgccattcacaagaagtggggcgaaggtactgtcctagaagtctctggtagtggcagtacccaagaactcaagatcaacttcccagaagtggggctaaagaaactcttagccagtgtcgcgccgattgaaaagaaataagttaagaccaggaagctaagttcactgtttcagattataaacaagtaacatcttttcagaaatttaaagttattactgaatgagactattgaaaaaagatattttggaactagtgcaaaatagattgagacttttcgccgtgaggaaagcatcggaaacgtattagtttctggtgctcggtagatttgagacagaaggctcaaatctaaggtatggaatcccaaagggagtcgctaccgtccgtcctcacttaaggaaagtctcaatagagaaatgaatattcagttaaaaccagcaagcctcgtttgctggttttgattttactggtggcatgatataatatactaagaatagagaaagaggcatgctatgaacgaaatcaagtgccccaactgtggggaagtctttacagtcaatgaaagtcaatacagcgaactcttgtcacaggtacggacagcagagtttgacaaggaaattcatgagcgaattcggcaagagttggctttagcagagcaaaaggcccttaatgagcagcaagagaagttagcaaagaaggatcaagaaattgctcagttacaaaaccagattcaacagtttgatactgaaaaagaattggctaaaaaagaggtggagcaaacagctagccaaagcctgctagagaaagaaaaagaagtgcaagcactggagaatcagttggccaccttgcgcttggaacatgaaaatcagctgcaaaaaacactgtctgatctagagaaagaaagagatcaggtcaaaaatcagctcctattacaagaaaaagaaaacgagctttctctgacttctgttaagcaaaactacgaagcccaacttaaggtagcaaatgagcaagttgagttctataagaacttcaaggcccaacagtcgaccaaggccattggggaaagcttggagcagtatgcggaaagtgaattcaacaaggttcgcagttttgcctttccaaatgcctattttgaaaaggacaacaaggtctctgcgcgtgggtctaaaggcgactttatcttccgcgagtgtgatgaaaatggagtggagattatctccattatgttcgagatgaagaatgaagctgatgggacagagaagaagcataagaatgcggatttctacaaggagttggacaaggaccgtcgagaaaagaactgtgaatatgcggttttagtgaccatgcttgaagcagataacgactacttcaacacaggaattgtcgatgttagccacgagtatgagaagatgtatgtcgtccgtcctcagttctttatacagattattgggctcctgcgtaatgcggccctcaattcccttaaatacaagcaggaattagcgcttgtccgcgaacaaaatatcgatatcacccactttgaagaagacctagatgcctttaaagtagcctttgctaagaactacaattcagcttccgtcaacttcggtaaggccattgatgaaatcgataaggccatcaaacggatggaagaagttaagaagttcttgactacatcagaaaatcaacttcgtctcgctaataacaagctagatgatgtttctgtaaaaaaattgacacggaaaaatccaaccatgaaagctaagtttgatgctctgaaaggagaataatctttgtattcagctaagaacgctaccttgtccatgaatgggaaaaccatggactatgtaacatttggaaaaggtaaacagccattagtgatcataccaggcttgggggatgggttacagaccgttaaaggaaaggcacaactcttttctctctcgtatcgtctacttgctaagcgatataagatctatgttttttctcgaatcaatgagttgaggcagggctatacgacgcgggatatggcagcagatgtagcagaagcaatggaggcactgcacttagataccgcttatgttatggggatttcacaaggtggaatgattgcccaatggttggtggcggatttccctgaaaaggttcaaaagctcatcttagccgtaaccactgcaaaacctagtcaacttgctagagaacgaattgagcattggcaaaaacttagtcaatctggaaattttaagcatctcatgctggatattgcaaagcattccttcacgcaaaagagttatcaaaagtggcggttgctttataatattatgggtcgcttggggcgaatcaaagatgaaaatagaatagccattcagtctcagtcttgcctggaacataatagcctggaggtcttaaaagaaattcaatgtccgaccttggtccttggtgcacttgaagatgatgtgatcggtgtgaacgattccaaggaactggcaaaagcgatttcgggttgtcaactcctcattcttaagcactctgggcatgctctttatgaagaaaataaagcatttcaagaggttgtctgtgaattcttaaactaaaaaagagagtgggacagaaatcggtaattcgttagaattcgatttcgtcgtcccacctccgcacagttgagtagggctgtaaaagctgatgaaatcagcgtagtagagcccactcaaccactgcgtcttgctcgacaatccaaaaataattgagaggctaggacttttgtcccagcctcttttttatgttagttaaatcgcaaagagatcgtttaggttttctgccatggttgggtgggtaaagatttgttttgcgatgtaagtataagggatcttgttgtccatggccatggtgatcaggttgatgatttcgcctgcagcttctccaaagagcgtcaccccaagaatttctttagtttctgggttgaccacggctttgaaggcccctcgaaggtctgcattgacgtgtccgcgtggcatagcagcaactggcaattctttaacagcaactggaagtcctttgtcacgtgcttcttgctcggtcaagccgacttgggccagtggaggagcaataaagagtgttgtcgcataattgtgacgagtttcgagattgtagctaccatcgcctgtaaggtagttgaagacaatgcggaagtcatcgagtgacatgtaggtgaattgaggaccaccattgacatcgccaactgcaaagacaccagggacgctggtttccaaatgacggttgacttggatcgctccacgatcagtgacttggatatctgtgttttcaagaccaagtccagctgtgtttggtttacgtcctgttgcgtagagaaggatatcaaactcgaagtctcccttatctgtgacaatcgttaagctgttttggccatctttgatttcttgggtatgaacgccttgcaagaattgaatgccatcttcttcaaggtagctttttgcaagagctgcaatacttggctcgatccgtggcaagaatgtttcagaagcatccaataccgttacttggctgcccaaggtattatagagatgagcaaattccaatccgataggtccaccaccaaggacacccaggcgtttaggtaggttttccaaacgttgaataccggttgaatccacggcaaatttactttcagccaaacctgggatcggaaggacatttggcacagcaccagtattaataataatggtttcagctgtcaattcttccttctcatctccagcttgaatttcgatgaccttgttagaaacgaaacgagccgtcgcgtcgataatgtctacaccggttccagcaatagttgcatagttctttccgttgagacgagtggtgacagcatttttctcattcatggcttgttcaaaatccaagcctttttctgctgcaacaatcaaggtcttggtgggaatacaagcgatattgatacaagtaccaccgtacatagatttgctcttttcaatcagagcgactttttttccttggcttgataatttcgctgcaagtgttttaccagctttaccaaatccaatcacaataatatcatacattaacatatgttacaccttctttcgctttctattgtatcaaacccattttaaaaagtctgaaatctgctacgggattttttagaagctcatgggaagtgggaaagagggacaagaagtctcatttcgtggtataataaagggtcggtggcccggatggtcacacaatcagttagaaagagcaaaacagatggacggaattatcaatgtaaaaaaagaagcaggcatgacctcacatgatgtggtctttaaactgcgaaaaattttaggaactaagaagatcggccatgggggaacgctggatccggatgtggtgggagtgcttccgatagcagttggaaaggcgacccggatggtcgaattcatgcaagatgaaggcaaggtctatgaaggagaaatcactttgggattttctaccacgacggaggatgccagtggggaagtcgtagagcggactccagtggaagcccctttagatgcagcagaggtcgatcgcatgattgcccaaatggtgggagaaatcgagcaagtaccacctatgtattcagcggtcaaagtcaatggacgtaagctctatgaatatgcgcgggtaggagaagaagtggaacgccctgtacggcaggtaaccatatatgaattcacgcgcaccagtgagattagctatgaagaaagtctagcccgttttcgtttccgggttaaatgcagtaagggcacctatatccggaccttgtcggtggaccttggtcagaaactgggctacgcagcccatatgtctcatctgacacggaccagtgctgccggtttgtcactggaagaggccctgaccttagaagaagtggctgaaaaagtagcccaaggagatttgagcttccttcatccacttgaaattggcaccggggatctggaaaaagtagagctgacagtcgaagaggtcggtgaagtccaagtgggacgctttattccagttgagagtgactccaaagagttagctgctttttaccaaggaaaattggtagccattttagaaaaaagagaagaactttacaaacctcgaaaagtctttctaacagaaagtgtgttacaataaattcatgaatattcgtacgattactactgctaaccagatccatttggagaatgagacagttttggttctgggctactttgatggcctgcatctggggcatcaagaactttttaaaaaggcgcgtcagatcgcggatgaaaaaggcttgaaggtcgctttgttaacctttcctgaatctcctaagttagcctttgttcgctaccaaccagaattgttactccatttgcaaagtcctgaggatcggttccaaaaattaaacgaactaggagtagatgagctctttctcattgattttacgaccgattttgcttctaaaactgccaaagaatttgtcgatcaatttgtcaaagccttgagagcccgagttttaattgctggatttgattatagttttggctctgataagaaaactgcctctgacttagctgattattttgatggtcaagtggaagtcatttctcctgtattggatcagagggaaaagattagttcgacccgcattcgtcaggctgtcctagaaggacgcgtccacgaagctgcctgtctacttggtcaccctttatccagtaggggaatcgtcgtgcacggagatgcgcgtggccgtaccattggctatcctaccgctaatctagcaccgattgatcggacctatctaccatcagatggggtttatgtagttgatgtcgattttaaagggcagacataccgtgggatggcttctgtcgggaaaaatgtcacctttgatgggaaagagcttcgtttcgaagtcaatctctttgattttacaggagatatctacggtcataccttgaccattcgctggttagataagattcgagaaatggtcaaattcgatgggattgatcaactagtggcgcaactagaagaagatgaagcagtttcacgaaactggaccaagagagtgggacagaaatcggtaattcgttagaattcgatttcgtcgtcccacctccgcacagttgagtagggctgtaaaagctgatgaaatcagcgtagtagagcccactcaaccactgcgtcttgcttgacaatctaaaaataattgagaggctaggacttttgtcccagcctctttttttcgggcctcttcttgggaaaaatgaaagggatttcttttttccactgaaattcagaaaaatcgtcgagaaatcaaaaaagcgcttttcaagcacctattttttttgtataatagagtcagatagttatatataaaaaaagaagtgaaccacatgattacattatttttatcaccgagttgtacatcatgtcgaaaagctcgggcttggttaaaaaagcacgatgttccatttaaagaacacaatattatgacaagtcctttgagcaaacaggagttgataagtatattggccttgaccgaaaacggaacagacgacattatttcaactcgttcaaaaatttttcaaaaattggatgttgatgttgaagatttatccatctcagccttgatccatctgattgaggaaaatccaagtctcttgcggagaccgattattttagataacaaacgcatgcagattggctttaacgaagatgaaattcgagccttcttgccacggagttatcgcaaacaagagttacgctctgccactctaagagcagaaataaactaagaagtatgtcgaatgcaaaaaaattatagttacccactggacttatcgtggagcactgaagagcttgcttcagtgctttcttttttcaataaagttgaagaagcctatgaaagtaaggtagaggccaaagaatacatggaagcctaccgcgcttttaagaaggtcgtgcctagtatcggagaagaaaagcgtcttggacgggagttcgaagaagtgagcggttattctctctatcgtgcgacccaggctgcaaagcaaaaagaggaaggatggttttctcttgaagaataagttagagtttgccaaacaaatcgttttagaggctggagactatttgcgtcttcatctccatgatgacttgatgatctcaaaaaagactgggccgacagatttagtcacccagatggaccaacaggttcaaaaggatttggttgaaaaaatcacacatcgctacccagaagatcggatttttgcggaggaagatggccttcgttcaccgatttcagaaggatccgtttgggtgattgatcctattgatgggaccaataattttgtgacccaaaaggaagattttgcggtgatggtggcctattttgaagacggaattggtcagtttggcctgatctacgatgtgatgcgggatcaccttttttacgggggtggagaattccctgtttatcgcaatgaggttgaactgacgccctttgtggaccaacctctggaaaaccttttgattgcttcaaatgtcggcatgcttgagaaaaatgactggggcatggccgatcttggtatggactctcttggcattcgggtctacggaagtgccggtattagtttttcaaaaattctctcaggtgggattctagcttattttagctatatctggccttgggattatgccgcagctgcgatcatgggggaacagttgggctataccgttttaaatctaaatggagataaacctaattaccagtcagtggaacccattatgatggttccaaaagtgaagttaacagaaattcaaacctatcttaagaaagggagaagttaaatgaattttcccaatggttttaaagaaaaataccagcatcttctaggtgaggatgctgctgctttttttgcgacctttgagcaagaagcagtatcggcctttcggactaatcctttgaaagaaaatcaaaaagcatttgatgatccgattcccaataccccttggggacattatggaaaggtctcaggaaaatccattgagcacgcaacgggcttggtctattcgcaagagccagcagctcagatagtggcccaagtcgctcagccgaagccagggatgaaggtcttagacttggcggcagctcctggcggaaagaccacccaactcttgtcttatttggacaatcagggactcttggtctccaatgagatccacaagggccgctcgaaaattcttgtagagaatgtcgaacgctttggtgcgcgaaatgtgctagtaactaatgagtctgccgatcgtctggccaaagttttctcaggcttttttgatctgattgtactagacgccccgtgttcaggtgaggggatgttccgcaagcaaccagatgccatggactattggtctgtcgattaccctcgagagtgcagtctccttcaaagagagattctagaggatgccctcaagatgttggttccaggaggttccttggtgtattcaacctgtacctgggctcctgaggaaaatgaagagatcgtatcctggctcttagataattttgatctagaattggaaacgatcgagaagatcaatggtatggcagaaggcattgactatccagaaacggcgcgcatgtatcctcatctctttaaaggggagggacaatttgttgctaagttccgttatctaggagagaatcgacctgccaaaatcccttccaaaaaggaccaattatctgcggaacaaaagaaatggtggcaggagtttgctaagaaacacttgaagattactctggaaggagtcctcgaaacctttggggacgaactctatttggtaccacttggtttaccagatttgcgcaaagtaaaaattgcccgcaatggcttgcacctagggaccttcaagaaaaatcgatttgaacctagttttgccttgggccttgctctgaaaccgagtgaggtaaaagagaccgtttcgatcacgcctgaggactttgttcattatgttgcgggagagacggttcaattgaagaaaacgcatccaaatggatggtaccaggtcctggttgaaggcaatggtttaggctttgccaaagtgaccggacagaccctaaaaaatttctatccaaaggggcttcgttttaggtaaaatgctgggcaaagaacccgttctatgatatagtggaagtacaggtttttttgaaaaaaacttgtcaaaatcataagtgaaatagtgaaatatcaaggagacatgatttgaaaaagtctaaaaagctgatcctaggactagcgacgatcgcattagcaggaagtttatctgcttgtgcttcttggatcgatcgcggagaatccatcactgctgtcggatcgactgccttacaacccttggttgaaggagtagtagatcgctacattgaagaacatcctggtaagattgtaaatgtacaaggaggaggttctggtacaggactttcacaagttcaatcaggcgctgtagatatcggaaatagtgacttgtttgcggaggaaaaatctgggatcgatccctctagtctggtcgaccatcaggtagccgtagcagggacagccatcattgccaataaaaatatctcaatcgacaatttgacaacagagcaattgcgaaagatctttacgggtgaatatactaactggaagcaattgggaggtccagatcttgaaatcacgattgtgaaccgagcggttggttctggtagccgtgctgtctttgatgccatcatcatggatggcaaacaacccaagcaggcccaagagcaagactctaatggaatggtgaaaaacatcgtttctcaaacgccaggagccatctcttatctggcctttacctacttggatagcagtgtcaaaaccatgaagcttaatggctatcaaccaaccaaagccaatgttgtcaacaataactggccaatctggtcttatgaacacatgtataccaaaggaaaacccaatgagttgtctaaaaaattcattgactacatgatgaccgaagagatccagcaaaaggttgttggtaagatgggctatatcccaatcaatgatatgaaagtcacccgtgatttaaaagggaatgtgacaaaaaaataaaagaattaggtaaaaaatgaacgaagtagcaaaaaaaatgctgacgaaatcaaaaaactcccgcctagaaaaatttgggaaaaccattacctttctatgtatgagtttgattgttgtcgtcgttgccatgattttgattttcgtggcccaaaaaggtttatcgactttctttgtcaataaagtcaatatctttagttttctatttgggagctcttggaatcctgctgcaaaggaattcggagccctgccaatgattctaggttcctttattgtaaccttgctttctgccctcttggcaacgccgtttgccattggtgcagcagttttcatgacagaagtctctcctaaaggagctcgtttcttgcaaccagcgattgagctcctagtggggattccttcagttgtttacggatttattggccttcaagtggtcgtcccatttacgcgtagtctctttggtgggactggttttgggatcctctcaggggtctttgtcctctttgttatgatcctgccaactgttacctttatgacgaccgatagcctccgagctgtgccccgtcattatcgggaagctagtatggctatgggtgcgacacgctggcaaaccatttggcatgtcacgctcaaggcagctcgctctggaatctttacagcggttgtctttggtatggcgcgtgccttcggggaagccttggcgatccagatggtggtcggaaactcagcagtggtaccaacctcgctcacaacaccagcttccaccctcacctctattttgaccatgggaatcggaaataccgtcatgggtacggtcaataacaatgttctttggtcacttgccttggtattgctcctcatgagtcttgcctttaacagtgtgattaaactgattacgaaagaaagaggtaagaagaactatgcacgctaaacgaatggataaaattgccacaggagtgctgtatgctatttcagggatcatcgttgcgattcttgcctcattgatcctttatatcttggtccgtggcttgccccatgtatcttggcacttcttgactgggaaatcttcttcttaccaagcaggaggagggatcggaattcaattgtataattccttcttcctcttggtcattaccttggtgatttccttcccactttctcttggagctgggatttacctctctgagtacgctaaaaaaggtcgtttgaccaatttggttcgtacctgtattgagatcttgtcttctttgccatctgtcgttgtaggtctctttggttacctggtcttcgttgtccagttcaaatacggattttcgatcatttcaggggccttggccttgaccgtctttaacctgccacagatgacccgcaatatcgaagatagcttgcagcacgttcaccatacacagcgcgaagcaggtctagcactgggcttgtctcgctgggaaactgtgattcatgtcgtggtaccagaagctcttccaagtattatcactggggtcgtcttagcctcaggacggatctttggggaagctgctgccttgatctatactgcaggtcaatcggctccagcccttgattggtcaaactggaatatctttagtgtgaccagtccgatttcgatcttccgtcaggctgaaaccttggctgtccatatctggaaggtcaacagtgaaggaactattccagactcgatcgaagtctcagccggttctgccgcagttcttttgatctttatcttgatctttaactttggagcgcgcaaactcggaagttacctccataaaaaactaacatctgcttaaaggagaagaaatgtcaaaatacaattgggatgagagacacatcattacttttcctgaagaaaaggtggtcctatcgaccaaagatttgcatgtctattatggaacgaacgagtccattaaaggcgttgacatgcagtttgaaaagaataagattacagccttgatcggtccctcaggatctgggaaatcaacctacctccgtagtttgaaccggatgaatgataccattgatattgcgcgtgtaacgggtgaaatttggtatgaaggaatcgatgttaatcgtccagatatcaatgtttatgaaatgcgcaagcacattgggatggttttccaacggcccaatccttttgccaaatcgatttataaaaacattaccttcccgcatgaacgcgctggggtgaaagacaagaagattttggacgaattggtcgaaacttctttgaagcaggcagccctatgggatcaggtcaaggatgatcttcataaatcagccctgacactttcaggtggccaacagcaacgactttgtatcgcacgggccatctctgtgaagccagatatcttactcatggatgagccagcttcagcgcttgatccgatcgcgacagcgcaattagaagaaaccatgcttgagttgaagaaggattataccattgtcatcgtgacccacagcatgcaacaagcagcccgtgctagtgattatactggtttcttctaccttggaaacctcatcgagtacgataagacttcgaatattttccaaaatgcgaaattgcaatcgactaacgattatgtatcgggtcactttggataaagtaaaatgacaacaaaaaggaaaatagaatgacagaaccaattttgcaagtcaaggacttgtcggtttattacaataaaaagaaggctctaaatagcgtctccttggactttgctccaaaggagattacagccttgattggtccttcaggatcagggaaatctacccttttaaaagccattaaccgcatgggcgacctcaaccatgaggtcaccacaacaggaaccatcctctacaatggacataatatctacggaccacggaccgatacggtcgaattgcgtaaggaaatcggaatggtcttccaacagcccaatcctttcccaatgtccatttatgataatgtgacctatggattgatgattaatggtgtcaaggacaaggctgtcttggatgaagcagttgaaacctctttgaaacgcgcgtccatctgggatgaagtcaaggatcgcttgcatgattcagctatcgggctttccggtggtcagcagcagcgggtctgtgtggcgcgggttcttgcgaccagtccaaagattattcttttggatgagcctacttcagcgctagacccgatttcagctgggaagattgaagaaaccttgtatggactaaaagaccgttacaccatgctcttggtgacgcgctccatgcaacaagcgagtcggatttccgataaaactgcctttttcttggatggcgatttgattgagtacaatgataccaatgaaatgttcttgaacccaactaagaaagaaacagaagactatgtctctggtaaatttggataggaagaaaataaaatgttacgagttcaatttgaagaagatttagaaaagttgcataaccagttttatgcaatgggaaatgaagtgttgagtcagatcaaccgtacggttcgtgctttcgtgacccatgaccgtgaattggcccgtcaggtcatcgaagatgatgcggagatcaacgaatacgaagtgaagctagagcgtaagtcttttgagattattgcccttcaacagcccgtttcacaagaccttcgtgtcgtgatgaccgtcttaaaagcagtctctgacttggagcggatgggggaccacgcagtatcgattgccaaggcaacgattcgcatgaaaggggaagtccgtatccaatctgttgaggaagaaatcagcaagatgggccgtgaggtcaaagattttgtcgaagcgacactagatgtttacctcaaaggcgatgtggatttggcctatgaagttgcttcacgagatgaagtcatcaaccattacttcgatagcatccaagaattagcaacagaagaaattcggaaaaatccagagtccatcgtgactggtcgtgattatttccaagtgatcaacttcttggaacgcatcggagattatgcaaaaaatatctgtgaatgggtagtttactttgaaacaggtaaaattatcgaaatgtaagatcaggacgtctttccgatatcagacaggcattctcatgcttgtcttttcttttattttgactttgtgataaaatagttttattagggcttttgattggaaagcatggaaaataaaaaggaggaaattatgcaagcagttgcacattttattgatacatttgtacctgagcactacgatctattcttggatttgaaccgctctagtaaaactttctcagggaaagtgaccattaacggagaagcaaaagagactcgtatctcgcttcaccaaaaggatttgaccatcgaaacagtagaagtagcaggtcaagctcgtccatttacggttgatgatgccaatgaagcagtttatgttgaattggaaggcacaggtcaagtgacagttaccctgacctattctggtaagatcacagacaatatgactgggatttacccatcttactacagcattgatggcgtgaagaaggaagtcctctctactcagtttgagagccattttgctcgtgaagcttttccaagtgtggacgagcctgaagccaaagcaactttcgatctttctttgaaatttgaccaagaagaaggtgaaattgccctttcaaatatgcctgaaatcgatgtagaaaaccgcaaagaaacaggaatttggaaatttgctacgactccacggatgtcttcttacctccttgcctttgcagctggagatcttcaaggagtgacagctaagactaagaatggaacccttgtcggagtctattcaacaaaagctcacccattagaaaacttagatttctctttagatattgccgttcgtgctattgaattctacgaagactactatggcgtgaagtatccaatccctcaatctcttcatatcgcccttccagacttctcttcaggtgcgatggaaaactggggcttggtaacctaccgtgaagtctaccttcttgttgatgagaattcgactgcccaaagccgtcaaacagtagccttagtggtggctcacgagttggctcaccaatggttcggaaacctggtgaccatgaaatggtgggatgacctctggttgaatgaaagcttcgccaatatgatggaatatgtcagcttggatgctatcgaaccaagctggaatatcttcgaagacttccaaacaaccggtgtgcctgctgccttgaaacgcgatgctacagatggcgttcaatccgtccatgtggaagtcaaacaccctgatgagatcaacaccctctttgacccagcaattgtttacgccaagggtagccgtctcatgcacatgcttcgccgttggttaggcgatgacgccttccgtaaaggcttgaagatctactttgaaaaacaccaatacagcaataccatcggtcgtgacctttgggatgctcttgggcaggcttcaggtcgtgatgtcgcagcctttatggattcatggttggagcaaccaggataccctgttgtctcagcttctgtggagaacgataccttgatcatccgtcaagagcagttcttcatcggagaaagagaagaaaaaggtcgcaagtgggttgttcctttaaatagcaactggacaggtattccagatactttggaaactgaagtcttagaaattccaaactacagtgccttgaaagcagctaacagcggagctcttcgcttcaatacagaaaatacagctcattatatcagtgactaccgtggggaattgttggaagacatccttgctgaacttgctagcttggatagcacttcgaaactacaagtggttcaagaacgccgtctcttagcggaaagtggtcaaatttcttatgcaagcctcttgccagtgattgaacacttgacagaagaaagttcctacttggttgtttcagctgtttcgagcgtcttagctggaatcagtctctttgtggatgaaggaactgaaacagaagcggccttccatgagttgttgaaacgcctgaaccgttacaactttgaacgcttgggtctagaagctaagcctggtgaaacagaagaagacgaaaaagttcgtcaactaatgattgctaatatgatcaaggccaatgatgaagctgcaaaagctcaagcgagcgctatctttgaagcgcatgcagatgatttggaaaaacttccagcggccatccgtttgcaaatcttggtcaaccaaatcaagcaccaggaaaccaaggagcttagccaacaatacctggatacttatgttaagacagttgatggaaactttaaacgccagttggcggctgcactttcttataccaaggataaggaaactttggaagctctattgaaggagtggaagaacaaggatgtggtgaaacctcaggacttggctatgagctggtattacaacttcttgcatgatgactttacccaaggtagaacctggacttgggcgcgtgaaaactgggattggatcaagaaagccctcggtggtgatatgagctttgataagtttgtcatctacccagctaactgtttcaagacccgtgaacggttgaatgaatacaaggccttctttgagcctcaattggatgatatggcgatcagccgtaatatcaagatgggaattaaagaaattgcagctcgtattgatcttatcgagcgggagaaagcagcagtagaagccgctatccttgcgacaaaatagattgaaaaaagatgctacagaattcattctgtagcatcttagaatgtagacaacgtcatctttgaaactttccttaggtgaggacggacatcagcgaacttctttgaagttccatgacttagttttgagcctaaggtctcaaaactcccgagtgcctgaaacaattgtgtttcaggcacttttctaacggcggaaagtttcagtgtatatttgattgagacttaaaaaatatattattttaatttttggggcatcatttaggttggttaatgatagtttaactacatcctaatggagtgggaaagaagtcctctcttttcaatttttccaccctcgcatagatacaacagtctggaagagtgttggaggttgcagataaaggaaatactgtttgcgtcacctcaaagcagtgctatgagcaatcaaccaatgtgtcaaactgttatttctatctaacatcaaaggctggacagattttgcccagcctcttttttataaatgacctgaataagacctcaaaggagaaggatcattagtttactggacttggtaagaggatctccgttcgataatggccattttctttgaatcgtttgatagttccttggtattcttgtactagggcatcaacgtttcgcaagccccaaccatctctttgacgtgttttacgagtctcttgttcctgttcattaaaggtattgttgatcgaaataaatagattttgttgaaaataacgtatattcagagacaatgttctctctgatttatcagtcaatcgaagacaggctgaaatactattatccaaacaatttcctaaaataacagctagaacatctggctgaatagatagttcttgtgggataaagcagttaatatccaattcaatttcatcttccacatcgtgcagtttttgattcagtaaataattaaccgttggatttttggagtaaaaggtttgttttcctgaaatactatcggttaacgattgaaggtactctctagcctcatcaggattttcttctagaagtgccaagagggttaaatgtttattttttaagtcatgccgaagactttgcaatcgttggtattcttcttgagactgctgtgtttctcttaattggaattgaagttgttctttatctaatttattttgataataagcgtgctgttgttgagaaagatgtaaggtaaaatacagcgaggaaaacgacaatacaataagagacaagagtgaaatgacagaaagataatctggtccaaatacttgcccttgaatagcagatacagtaaaggcaaaaataatcgataaaatcggcacgataaattgataaagccaatttcttctagatgttgccatgcttaacttttgatgtgttcgaaatagctgtcgaagaacaagagtgatcacagttgaaaaaagaaaactgatggcaaggtaaccactaatcattcctaaatttttcgatacttttgatagtggaagaaatagttggatagcttgattgaggacagctccggctaataatgtcaggcttgtttgtaagaatatccaaaaggaagaatcacgaaaggagtagccaaaatagagtcctacaagagaggattctaaaatactaagaaggagattgctgactaaaaaaacgcgactttctaaaaatagaaacactagagccacatgaaaaagaaagcaacaacaaaggactaaaagtgtctcttttgaatgtttacttttggatattggcccataaaataaaacacttgctagaaataagtcaaacaagatactaatgatccgcaatcctattagcattagaaattcctttcactgagatagttatagtatttttctttaaaagaagactggaacttacgactaattggaagtgaatgttcctcggttccatttagcaaaatagttactgttttcgcatcaaaatctttgatatatttgggatttacaatataagaagcatgaatttgaataaaataatcaggtagtttatctaaaatttcttgagttttcagtaaggacttataggtatctgctagtgtgtaaataaaaacggaacgcttatctttctcaaaataggtaatgtcacttaaaggaatagagtaactttgttttccaaatgagaagttaaagatggtttgtcctaaatctaaataacgtaaaattctgtctactaccttatttagcctttgaggttcaattggttttactaagtaatcaaaagtctgtacttcaaatacttgttccatataatcacgatagctggtcacaaaaataatggggataaaaggattgaactgacgaatttcacgtgcaaggtcaattccagaaatttgtggcatatcaatatccaaaaaaacacaatgtgtatcccttgttaactgttctagcattttttgtggatttgtatatagttttgtttctacaggaaccttgtcgtaagaaagtaaatactgttctaactgactagcatctctagttgagtcatcacaaataacgacgtttaacataagtcccccttatcaaattgagttggctaattatgacactaaaatggtaaatcatgacgtaaaccaaggaaagtcatatgtttattatacaataatcttatcaaaaatgaaggaagctgggaaaatcttctcagtcttgagtgatgagatgaagacatttgcaacactgactattagagatttgacaaaatcatttgataagcaacattttgctaataaccatatttccttagaaatagaagccgctaaaattacagcttttttaggacacaatggtgctggtaagtccaccctcttaaatcaaatgattggttttaccaaacctgataaaggagacgttagctatggagacatttcttttgtacagaatcgtaaacaagctcgctcaatgatgagctatatgtctcaacagtatgcaccacttgaaaaattaacggtggaacaaaacttagaaatgcttggaagaatgagagggttaaacaccatagatttacaaaaagaaatgaatcagctcttaaccgagttggaaattgaggactatcgggcaaaacaaggaaaggatctctcaggtggtttaaagcgtctgacctcttttgcaatggctttaatcggatctccgaccatcattcttcttgatgagccgacgaacgatgtcgatccaatacgtcgtgaaaaacagtggcaattattacagaagttggcgcataaagggcataccattattattgtgacacataacttgttggaagttgaaaaatatgcagacaactatgcattatttaaccatgggaagttaatcaaatcaggaccagttcagcaaataacctatcaaaaacagtatcaaatctcttttgaatttaggaatgcagatagcttagctctatttcaagattataccattatcaatggttcgatttgccagattgaaatagaagagaaggagttaacgagactgctaccaaaaataacacaggaattggatagaaagaatatttttaatctgtcacttgctcagaaaaacgtatccatttcagatctttatagagaggagttgacaaactgatatgactcaatttttttacttacttcgttggaactatcttcgtcaaaaagatctatttctactctttacgctagctcaggttctgttgtccatttcacttctttttggttatccactagtgatcggtgagattgatacgacagctgcctactatctctcttctggttcagttctgataggaatcatttctattggctgtactatctcatcccctgttatagcaaatgcgaagtcagaaggacatgtagactacgtacgagcccttccaatacctcgaattctgatttccttagcagatctttggatgtggatgattgctattttgcctggagtgttcatttctgttatactgggctattttcgtttttctgtccgcctaaatgtatctgttctggctgttttcatcctatttctgatctgtcttacgatgatcagtcttggatttgccattgcttatactttttctcccaatattgtcacgctgatgtctcagttgattctcatgattggtttgatgttttctccaatcatgtacccagcgagtcgtcttccagattgggtaaaccatctctatcatgttcttccatttgtcccttctgtcaacctcctacgagcttgtgtctatagtcatggtcacgtctcattttttgacttcactattctgatcatctggattttgctaacacagttactgatcttgagagttctttataaggaaaaataaaggaaggaggggagatagaaggttcttcttcgaaacagtaatccatttaaaagtagtttaattgaagagatttataaatgtatccctacaacaaaaatcaacatctgcgttcagatgttgatttttttaatatatcctctaagccctttgtatcttatttgaaataccagtggtgtttgaggctggcaaaaatcgccttgctggtgatagtgatgatgactagtttaatgaggtcggcaaggataaagggagcaacgaccaaagcaaatgctttttggagatcagtatgcgtgaccagcataaagccgatagctccggatacaaagaggagagcactactgaggagattggcaaaaaagatagtgaaaatgctggatttagcattggtaaatagagacgtgatccatgctcggaatgggaagaagaggaggaaaccagcagtaggaccaaggaaatgcgaagcaccaccagcacctccggcaaatactggaaaacctaagaagcctaaaagcaggtagaggcagactgtgacaaaggcatggctgggtttatagatggtcccgatgatcccgatcatgagtgtctgtagggtcaaaggaatcggaccaaatggaatggtgaattgagataggacggagatcatggccactccaatggagatgagaactaagggaaagattttcttcataacagttaacctcgtatttattctatggtaactattctacaataaggagctcaacctgtcaatagcccacgcttgttttaggattttttaagtaaaaatttaggcaggcttaagactcctaaagtataatcgccttactaaaggatcgagctccctttaaattttaaaagaaaagtacttgtacaaaaagataaaaggtaaaaagatgaatcaaaaagaaacaaaacaagtagtcgaaacgcaagaatccaaagaaaaaatggttgtcctcaaacgaagtcctaagtggtggattggcatggcagccgttggtggattgttggttggtgctggaagtggctttggtgtcggtgtcatcgcctcacaatcttccaataatcaacaattttctcaaccggtccaaacgggtcagaaccaaggatctaatcagcaacaaaatagtcaaaatggccatgcttcacaaggaaaccagcaaaatggtggcccacaggatggcggccctcaaggcggtggtccacaaggtggtggccaaggacaaggcggcccacaaggcagcggacctggtcagatgccacaagaaggcaatggtggcccacaagggaatggtccagataatgacatgaaccaatctggcggacaagaagggaaccagggttcctctaaaaagtccaataagaagaattcaaaaaataaaaacaagacgagtgatagtcaaagtaacaaagaaaacacgacaaactcatagaattagcctccctcaggcaggctgaatttgatcataaaaccgggttctaaactataggaaatgaaggcaagtcgtgttataatggttaagaatagattagaaagactcactcacgaaagagaagaggatacgacgatgattaaaattctattggtcgaagatgaccttggtttgtcaaattcagtatttgattttttagatgattttgcggatgtcatgcaggtctttgacggagaagaaggtctctacgaagcagaaagtgggatctatgatttgattttgctggacctcatgcttcctgaaaaagacggtttccatgtattgaaagaattgcgtgaaaaaggcgtgacaacccctgttttgatcatgacagccaaagaaagtctggatgacaaagggcacggatttgagctaggggcagacgattacctcaccaagcctttctacctagaagagcttaagatgcggattcaagctctcttgaagcgctcaggaaaggtcaatgaaaataccctcaattatggcaatttgaaggtcaatttatctaccaattcgacttatgtggatgggaaagaagtggaacttcttgggaaggaatttgatcttttggtctatttccttcaaaaccaaaatgtcatccttccaaagacccagatcttcgatcgtctctggggctttgatagtgacacaaccatctcagtggttgaagtctatgtttcaaaaatccgtaagaaattaaaaggtactgatttcgttgagaacttgcaaacattgcgcagtgtggggtatatcttaaaagatgctaaccagaattaagaaaaccgtcggggaagatgatttttcctacttcatccgatattttgggctctttactttgatattctcagccatgaccctgattatcatccaggtcatgcgctcgagtctctatacaacggtcgatgaaaacctcaagactctcagtcaggatccctactcgcttgtagcgattgcttatcgagaccagcgacagtcaaataccaaaggagatgataatgatcatgagatgatgatcccagatcatgataaatcagaacctaaaggggatgtcacatccaataccactgttgttttgctcaataaaaaatatgaaaacttgacaaccggtaatgggtttttaaacttcaaaaccgtgacgtttggtcgaaagctcctcaacaaggtttcccaacttcaaattacaaatagctatgggaaaaaagaaagttaccgggcctatatggcagagttgagtttatctgatgatgaaagtgatagtgatatcaagtatgcggttgtcatgaccaatatcagtcagctagagcagaccagtgaagagcacgaaagtcaaattgcccttgtcatgatctgcttctggggaatctctttattcgctagtctcttcttagcacgtctcagcgtcaagccccttcttgagagtatgcaaaagcaaaaggctttcgtggaaaatgcttcccatgagttgaggacgcctttagcagttctgcaaaatcgcctcgaaacgctttttagaaagcctgaagcgaccattatggaatcgagtgagaatattgcatccagtttggatgaagttcgaaatatgaagctcttgaccaccaaccttcttaatatcgctcgaagagatgacggcttgaagccggagatggaagatatcgaaccaagctttttcgatcagaccttctcgaattttgagatcattgcagaagaaaatggcaaaatcttccgaggagacaatcaggtggacaaagtcatttgttctgatagaacgctcctcaagcaattgatgaccattctctatgacaatgccttgaagtataccgatgaagatggtgagatccagtttgaagttcaattgaaggataaaaatcttcttttgagagtgctggataatggtccagggattcgagatgaggataagaaacggatctttgatcgtttttaccgggtcgacaaggccagaacccgtcaaaaaggtggatttggcttggggttatccctcgctaagcaaatcgtagaagcctttaaagggaccattcaagtcaaagataataaaccaaaagggaccatctttgaagtgaaattatccattaagacggaaagtcgtaaaaaaaatcgttcataatcttttaaaaatagaaaagaggaaaacctatgagttcaaaaatgttgcacacttgccttcgtgtggaaaacttagaaaagtcaatcgctttttaccaagatgcttttggttttgaagaaaaacgtcggaaagattttccagactacaagttcacgattgtttatttggccttgcctggagatgactatgagctggaattgacttacaattatgatcatggtccatatgtcatcggagatggctatgctcacgttgccttgagtactcctgatctagaaggtttgaatgcggaacacaaggctaaaggctatgaagtgacagaaccaaaaggtcttccagggacgcaaccgaattactatttcgttgtagatccggatgggtataaagtagaagtcattcgcgaaaaataagagggattaacaataagggccgctgtcggctacgacagtcgccctcttttttatgaaaccatttacaaaaaaggaatgttttttcgagagaaatttgctataataaagttatgagattcaaacacacgaaaactattttattaatcattacaaatctccttttattgagtcttttgtatatcggctatcaaaagattcaaagggttcgtgaacaaaaagcctatcaggatcagtttgctaaggttacccaacttgagaaaagctctgaaaaagggaaagatgttcaagttcaggaagggattttaggaacttcttatgtgacggcttattatcctactaaggatggacagcctgttgagattattaaagagaagatccaagaagaccttcagcgtctaggatccgatgaaaaaaccaaagaaccaaagcatttgaccttctaccatagtgaagaagcagaagcgccttttgttggttatcaccctatccaaatcaaacgggctgaataccagtacaaaaaagggaaattcatcaaagatgagacggtgaagttgcccctcttttacttggatgatgagaacaatcctctaaccctgagccaagtttttgcggatccagatggagccaagcagatctttttggaggaattacggggaaatctagcctttcgtcagctagacgaggaaagcattgatcaaatggttgcccacttctcagagttggatttgagccaatgggaattccaatatgaaaaaggaaatttcaccattccatttccaactaaggttaagggagatgataccttcactgttcctttgtctaaattctatgacgtgattgatacagagcgcttgcttcctgatgatctagcttcttacgaatcctatatagaagaacgccaccgtaagatgattgctctgacctttgatgatggaccagatccaaccacgactcctcaggcgctggctatcttaaagaaatacaatgccaaagctaccttctttatggtcggaaaaaatgtcagtgcgaatccggatattgctaaacaagtccgcaaagaaggtcatcaaatcgggaaccatacctgggatcaccctcaattaccaaaattgagcttggataatgctaaaaaagagattttggatacccaagaagcaattcaaaaagcgacaggcgtccaaaccaagattacccgtcctccatatggagccatcaataacgccatccaatacggtgtcgaccaatccttcatcatgtgggatgtggatagtctagattggaagacacataatacgacggccattctcaatgaagtgaaaaaagaagtcaaaccgggttcgattatcctcatgcatgatatccatcaaaccacgattgacgctctaccgaccgtccttgactacctcaaatcacaaggctatacctttgtaacggtggatgagttgttggattaccaacttgaaagtcatcgcatctattacaatggaaattaacgtaaaaatcctctgcagttctttcactagcagaggattttcttattcatttaaaaatagttcggaattttttaaaacaagttcacggacagaagcgtattttttcaaggatttgagttcttctgggtgggtgataaaggtgatcacatagccatcacgccccattcgacctgttcgaccgacacggtgggtataggtctctatgtcacgggggatatcgtagttaatcacacattcaagatgttcaatatcgattccacgagcgaccaaatcggtggccagtaagagagttagttgatggtctttaaagcgttccaggatgaccttgcggtatttgacattgacatcgcttgcgagcgatacggccccaacaccacggtattgtagtttttcttcagcactacccagatcagacaggctattgaaaaaagccagaccacgaaaatcttcgacgtaggcgagtttgcggagcaattcgaccttgtcccgcttatccacttgcatataaaaatgttggatattgtccaaagaaactccatcaaccgtaatgcgaagagtattttcctctaattggtctggatcgaccttagctgtggcgctcatgtagatatgttggtggtcgcggggagcatagtggctgatcttgtcgacgaagtggtactgagaatcgctcagtaattgatcgaattcatctaaaatgatggtttccacattcttcattttgatctttttcagcttgatcagttcaaagatccgaccaggcgtcccaaccaggatttcgggtccttttttgaggcgttcgatttgccgtttttgactagatcctgaaaggaagagttgtgtctggagaccgagaggctctgcccattgtttggtaacatcaaaaatctgtcctgctaactctgtgttaggagccaaaatcaagagttgttgggccttcttcggtttgagtttgagcaagctcggaaagaggtaggcgagtgtcttaccagtaccggtaggactgatcccgaggacattttctccttcatagataggggagaagatctgttcctgaattttagtgaatgtatcaaatccgagtgtttctaactggtctttccagctttgtggaaattgttctttcattctttttcatccttaaattgtattccagcgctttgacgcatctggtagagggtttcatggacctgctcagctgtttgtaaccattcaagataagcagctggcttttgatgagcgatggcaagggcaaaggcttccgcctcttcttgcatttggtgtgggtagggctggatcggaaggtcgatgacttccccagaatggctgacgaagcgggcctggttgatggctgctacagcattgagagttagtgttccggtcttagtgtagatttcagcaggtagatggctggtgatatttttccctgcctgaatggcaacctgaaactctggataaatcaagacaccttgaccatagagatcaaccgaattgggtaattgctgagcggtgtagtgactggagatcggttctccaaagaagccaatcgccaagtagaggcagtagacacccagatccatcaaagctccacctgcatagacatctgagaaaatattgggcatctcacctgcaagaagggctggcaatttggaagaatatttggcaaaggtgaagttggcgcccagtatttcctgattagagaggaagtctttaactacttgaaaggctgcttcttggtaatttctggcagcttcaaagagatagacctggtgctccttagcgagcttgaccagttccttccattcagaaggcttggtcacagccggtttttcaatgatgacatgcttcttggccagaatagcaagcttggcctgagcgaaatgaagagaattggggctagcaatgtaaatcacatccagctcactgtctaagaagtcgatgaaatccgtgtagcaagagaccgccccataaggctcacaaaactcttgagctgtcttcatctttctcgaatacacagcatgcaagtgatagtggcctgtctgatgagcagctgtaataaattcatgtgaaatccaactcgtaccaataattcccagctttaacataaggtgtccttccgtaatcgattcactctattataccatgaaaagggggaggggacagtataaagtagaaaatatgcactgattattgtataatgaagtgatatgcttagaagggaaaacaataggattgagaaattcagaattactgatcattattcctgcttataatgagagtggaaatattgaaaaaacaatcaagatgattgaagaacatacacctgaatttgattatgtcattatcaatgattgttctacagatcatacacttgaaatttgtcgcaataacaactttaacgttatcgatttaccgattaatttaggaattggtggtgctgtccagactggttatcaatatgcagttaaaaatggctatcaatatgctgttcaagtggatggagatggtcagcataatcctgaatttatcagaaagatgcttcaagtccttcaagagaagaatgtgaacatggtgattggctctcgtttcattgaaaatcaaggtttccaatcctccttcgcgcgacggattggaatttcattttttgaaaaattaattaagattttaaccggtcaaaaggtaacagatccaacctcaggattgcgagtggctgatcgaaaggtgattgaagaatttgctaaacaatatccaagtgattatccagaaccagagacgattgtgtccctcttaacctcaggctattccgttgcagaagtgcctgtattaatgaatgaacgagaacacggagaatcgtccatcacattaagcaagtctgtttactatatgatcaaagtgacaatggcaatgctattggctagaattggtggaggatataagaaataacatgttaaatatttggttaacccttattgtaattatttttatcgtttatattctacgcctagttgcaaagaaagtcgttgaaatgagaaatgtcatttcttggcttattctttgtttactctcgttgccagtcatttggtttcctaatttgattggacagttgtcaaaaatgttaggaattcaagttccaagcaatctaatctttttcttaggcttctgtttacttgtctatttaaacttctctttgactcggattacctcaaaacaatccgttcaaattcgacaattgtctcagaaaattgcattacaggtaaaagagcatgaagaataatcaacctgtttcaacggagaaggtgtatttttggaatctgttagggaacttggcatttgctggatcatctgtactatttacattgatcgttacacgcatgacctcgccaatggaagcagattcctttagtcttgcctatgggattgctgcgattctagtagtagtaggcatgtttcaagttcgaagctaccaagggacagatgttctctttagacactcctttaccagttacagtattgccagatgtctctctctcctactcatgatggcgatcttttttccttacctttttgtttcaggaattgatctacatgagagttcaaaaattgcgattattggcttatacgttctatttcgtatgtgtgaggcaatttcagatcttttccaaggattgtttcaacgtcacgaacgattagatatcgctggcaaatcaatgaccattcggtattctttcagcacgattcttttgttggcatttttgcttattacaaagtcattaacacaatcattgctttacttagttgttttaaactttatctttgtattttgttatgattatgtaaaatcaaaagaatttgaaacaattgatttctcagtaaaaaatctcaaaagagacctatttgatgcgatcactattttaaagaattgtattcctctcttcattagtggatttttactagcttatattttcaatgagcctagaatcgcgattgactctgaaattagactgggacactttattgcagggacacaacgggactttaatattttgtttatgcctgtgttttttatgagtctctttattttaattcttagacccttaacaacgcaattagcgatcttatggaagaataaagaattgaaaaaatttgatgccatcattgcgaagatgtttgtcattgttttgggtgtcggcttggtattaactgtgctagcttatttgatcgggacgccgatattaagtcttgtttttggtttacctttaaaccagcatagtactaccctagccatccttgttttttctggaattctgtattctattgggattgtttttggggatatcatgacggttattcgaaaacaaacgtatctattgcctgtgtatttattcatgtttatagcttccaaattgacaaataatgatttggtacaaaaaatgggacttctaggtgcgtctttaagctttttcatcgtgatgtctgtttattttagtggaagtttacttgcttattttattgcaagaaaaatagaaaggaaggactatgctcattaatcaacaacatacgtgggtgatttgtgcttatggtgagagcgaatacttggaagcttgtattcaatccttgaagaatcaaactctccaatcacagattatctgttacagttcaacaccactggattcgatcaaagaactttgtcagcgttatgctattccgttttacaccaagcaaggtggtgggattggtaaggattggaacaatgctatgtcttttgtagagacgaagtatgctaccatcgcccatcaggatgattattatgagccagactatgctgagaaagttttggataagatggagaaacatccagatgtgttgattgggtattctgattattttgaagaaaaagatggccataaaattcctgcgaatacaaatctgaagatcaaaaccttgatgttaaaaactatgaatctttttcctgctagtcacttttggcgaaaccgtgtgatggcttttggaaatccgatttgttgtccagctgtcacctataatcgtgaaaatttgaagaatttctattttgatgaaggaatgagagtgagtttggattggtatgcatggtataagatcagcgagtataaaggtcgttttgcttatgtatctgacaagctcatgtgccaccgtattcatggagagtctgaaacatcaaaaacgattgcagacaatacgcgtagtaaagaagatctatacatgtatgaactcttttggcctaaatggatggccaagttgttgatgagacaatatgtgaagagtcaaaattcgaataagtaggagaaactgatgagatattttgttgatagttatgagcgaaataaaaagtatttagtagctttcgcagttttggccttttgtattacagtgatttatacaaagcgcttagtagattttcctaaaatcggtgtagcgttatttgttgtattggcttttttcatttttcttttaccgaagaagaatgttgggaccttccttgcgatgctcattggtggtctgtcctttgcttttattacacccgttttgaatacgccagatgaacaagttcacctttcaagaacgattcatattgtggaaggcaacgtcaatatgggcaataaaaacatccatattacggaagattactttgatgtttataaaaattttaaaaaaccatttaccaaatcttctttgtttgaagaagggcagacgagcaaacaagtgaagtttgggaaagaaacagattacagggcaaccaactcatattggtttattggttatatccctcaggctcttggatttgggattggaaaatttttgaacttgagtgtaggagtctcctattatcttggtcgaattttcaatgtcattgcttactgtattttagctctcattgctattaaatatagtgggaaagcgaagcagttgatgacaatggtagcgatgtttccaatgaatctggttctagctgcttcttataatcaagatagtgtagccttaggtttaacctacattattattggattgtttttgaaggatgtaacggatgatgaaaaagtagttaaaattaaggatttattgctttatgctttcctttgcgtgatccttgtaacaatgaagcttccttatgtcttgcttgtgggattattgctatttataccgaaaaagaaaacgcaatgtaaaaactactatctcatttctcttgctttgattgctgcagtctttctatttacgattttttggtatgttcttacccagcaagttcgaattgagaactttaaactagatggagcggatgtgaagtctcaggtgattagtatcatttcgaaacctcattggtatcttccagtgattttgaaggagatgctattatcagtcagtcatttgaatcaactctacacctttggttggttagatttatcgatgtcagaagtccttattccaatttatgctctttatactttgattactttttcaaatattgggaaaatcaaacttcctaaagtatcagtagtaggagcaagtttggtttctcttgcaattgttggtttaatttctttgaccttgtatctgacctggacaccagttggaaattttgaagttttaggagttcaaggccgatattatttgggtgttgttgctctttgtctaccagttatttgtagtttatttaagcaaagagttccagatgaacaaaagttctctgatcattttgtagtacaaagcagtctcattattttatctctaacattactacaaaccatctctgttttatatgctgcagtttaatttaaaggctaaaataagttattactaggggaaaccctagttttttgttacaatagaaagtgaaaaattcaaggagtaagagatgaccatatcagttgtagtcccatgttttaacgaagaagaatcaattccattgttttatcgagagatggaacgtgttcggatgaaaatgggagaaaagtttgaatatatttttataaatgatggctctccagatggtacgctatccattcttcgaaagctacatgttacagattcaaatgtgcactacctttctttttctcgaaatttcggaaaagaggccgcactatatgctggacttgagcgtgctagtggtcaatatgtgacggtcatggatgtagatttgcaggacccaccagagttattgatcgaaatgaagcagaagttggaggaacagccggatttagactgtgtcggaacgagacgtgtaacccgtgatggggaaccgccgatccgctctttctttgcgcggatgttttataaattgatcaatcatattagccaagtggaaatggtggacggggcgcgtgatttccgtttgatgcgccgtcctatggttgatgctatcatggaattatcggagtacaatcgtttctcaaaaggaatttttgcttgggtaggatttgagacagaatacctcgaatataaaaatgtagagcgtgtggcaggagagacgtcttggaatttttggtctctctttaagtactcgattgaagggattgtcaatttctcggatgccccattaaacattgcctttattggtggactgttatcttggattttggcctttatcatgatgattttgattgtaatccgcaccttggtctttggggatcctacttcaggttggccatctcttatgacagtgattcttttcctgggagggttccaattattgaccatcgggattttagggaaatatattggtaagatcttcatggaaaccaagaaacgtccaatctatgttatcaaagagaaaagtgaagaatgaagaatatcctaagtatgagtcttgctgctaagcaaaagatagacagattttacgagggagtggatcggctcctcgataagatcaatcagttggatatggtaaaagggatccgcagttatattgaccggcttatagatgttttcaaccaaatcagcaataagttggtctacctattactaacttcctatgcgctcatttttacaattgtatccttcaatctgatcaattttcaaagtcgctcatatgactatgtcttccatttatcccgcattgtcggcttagcagagtccattgagcattgggatttactccccaatctgaattttttatttgcattcggtacgggatatgcttcccctatgttttatggaaattggcagttttatccgtcagccattatttatatgatgaccaacgatggaaatcttgcttattctatatttgcatttttgatcactcttggtacaagcctaacaagttatattgttgtttcaaaaatagtaaaaaataaggcgactggtatagtagtggccttgaccattccttgttattacaccttatttggttttggaatgaccatggtagtaccacttgtcccaattcttatttattctatttatcgagtgctctacttaaacaaaaagaaccctctctatttagggattgtagtagcgcttttaattcaaacccatattttatcaacgatcatattagcaattttttctgcggtatttttatgtttaaattataaaaggatcacacttgaaaagattatctcttttgtattttctatcttgtttgccttatgtttatcagcagggtacatttttcaatatctggaacaggtttcatcacaaaaatttttcttcacatggacagcgagaaattttcctgtcaatgtgaaagatacttttttggttccttttccatttcaagcagatcgatatggtttttataaacctttcacaccattagagtggccgatccatcaatttgtacgagatggtctattctatgcgagtatgatggtaatcttattctatcgccgtctagggagtttaagtaaaaccatattttggacttgttggatcttatatttttctgcaacgagtctgctgccttggaattccgtattgaaatacacttttttagggagtatgcagtattcagggcgcctattgtttttcattcccctcttgttcctattctttcttgctgttacaaatagaaatggatttttctctattgtcttatgcatcttgagtttaactttctatttcaatcatgttgtccctcaatttgatacatcctcaaaaaactataaacagatgcgggatgataataaaaagaatgaaaaattactgaaatcagtatatagaggggacaaatcaaaatatattgatcctgtaggtgatgaatattataatcttgatatcaataaccaagatatacgcttaccacaatttacagaatttcaaacagctaaggatgtaaaaatatcaactattaaaaagagatacaatcttttagaattcgatatagaggttcctgatgataaaaaagaaacaactatttctataccaatgatatggtacaaaggatatcgcgcagaatattctaagggagcagaaggttctcaacctgtgttgaaacatcgtgcttttaccgaatcagaattaaaagaaaataaaaaagatcggaaaccaactgtctcagaaaaagttttaaatgatggtaaaatttatttatctattcgaaattctggacatgtcaaaatttcttatcacaagacatttatacagtatcttggtttcatgatagagtggatctcttggatactggtattctttatttttaagcagaagtattcaaaaaataaggagcaattcccatcttaaaaagcagaaaacttctgctttttttgctataatgatagggaaaaagcatttgaaaggaatttaacatgattttaattacaggagcaaatgggcaacttggaacagaacttcgccatttgttggatgaacgaaatgaagaatatgtagctgttgatgtggctgaaatggatatcacaaatgcagaaaaagtagacgaggtattcgcagaagtgaaaccaaccctagtctaccactgtgctgcctacacagctgttgatgctgctgaagatgaaggtaaagagttggactatgcgatcaacgtgactggtacgggaaatgtagcaaaagcgtctgaaaaacatggtgcaaccttagtttatatctcaaccgactacgtttttgatgggaaaaaaccagtgggacaagaatgggaagtagacgatcaaccagatcctcaaacagagtacggtcgtaccaaacgtatgggggaagaattggttgagaagcatgtatccaacttctatatcatccgtacagcttgggtatttgggaactacggtaagaactttgtcttcaccatgcaaaaccttgcgaagactcacaaaacacttacagtcgttaatgaccaacatggtcgtccaacctggacacgtactcttgcagagttcatgacttatttggctgaaaaccgtaaggagtatggttattaccacttgtctaacgatgcgaaagaagatacaacttggtatgactttgcagttgaaatcctcaaagatacggatgttgaagtgaaaccagtggattctagccaattcccagctaaggcaaaacgcccactgaactcaacgatgagcttggctaaggctaaggctacaggattcgttattccaacttggaaagatgctttgaaagaattttataaacaagaagtgaaataagaacaaatagaagcggccctcaagggtcgcttttctgtttggattaggcaaaaagcctagaaaatggtataattgaatagactgtgaatgatttgaaagggaactctatgcaacatgtttttattatcggaagtcgtgggcttccggctcaatatggcggttttgagacttttgtggaccaattggtttcgcatcaagtgtcttcagatatccagtaccatgttgcttgcctttctaatgatcaagcttatcaacattttgactacaagggtgtggattgttttacgattaaagcccctaagcttgggcctgcgcgtgtcatcgcctacgatatgatggccatcaactatgccttgaagcttattaagaaacaaggaattgaacagccaattttttacgtcttgggcaatacaatcggagcctttgtggcaccctttgcgcgtaagatccataaaatgggtggccgattctatatcaacccagatggactggagtggaagcgggccaagtgggccaagccgatccaagcctatctcaagtattctgaaaagatcatgacgcgccatgctgacctggtaatttcagacaacccaggtattgagtcctatattaagaaagcttacccgtggtctaagacgacctatattgcctacggaacggacctatctccgaccagcctaagcagtcaggataataaggtccgagaattctatcacaagtggcagactcaggagaaaaactattacctaattttgggccgctttgttccagaaaataattatgagaccgccattcgtgaatttatggcctcttccaccaaacgggatttggtgatcatttgtaaccaggaaggcaatccttattttgaggagctccgagctcgaactggatttgatcaggatcctcgtgttaagtttgtaggaacggtctatgatcaagacctgttgaagtatatccgtaaagaagcctttgcctatatccatggtcatgaagtgggcggaactaatcctgggctcctagaggctctcgctcatacggatctgaatttagttttaggagtctcctttaaccaaacggttgcaaaggatacggctcactattggactaaagaaactgggaatttggcacatttaattaaccaggtcgatcccttagaagatgtatctgaatgggggcaacgtgccaaggctaatatgaagcaaaactttacctgggaaaaaattgtaggtgagtacgaggaattattcttattatgaaagtaaatatcttgttgtccacctataatggtgaacagtatctaaaagagcaggtcaaaagtatccaagaccagacctatcaagactggcaactcttgatccgagatgatggatcgacagatggtacggtggagatcattcaagagttggtggcccaggatgagcgcattcgctttatcaaccaaggaactatcgaaaatctcggtgttatcaagagcttccatgcgcttctgaaatatgaaaaagctgatctttattgcttcagtgaccaagatgatgtctggcttcctgaaaagattgctcttcaagtagcagaagccgagaagcatcctcaagaagtgcctttgctggtctacacagatttaaaagtggtcgatgaaaacttgaacgtgcagcatgaaagcatgattcgcacccagtctgatcatgccaataccgaactgattcaagagttgacggaaaatacggtaactggcggagtggccatgattaaccacgcgctggctgacttatggacaggtcaagaaaaacatgcgctccttatgcatgattggtatttggccttgttggcaactgcctttggcaagctcatctatatcgatcaaccaacagaattgtaccgtcagcacagtagcaatgttctgggtgctcgaaccctcagaaaacgggttaaaaattggatccgaccccatgtgctgtttgccaagtattggaatctcatagagtctagtcaagaacaagcaaaaaatctattggatctgcctgtcagttcccaaactaaagaaattattgaaaactttgtcaccattatggatgttccactaaaagaacgtctgagacggattcgtcagtatggttatcgtaagaaccgagcctttcacacctttgtgtttaccagcttgattctgacaaagtttgcatatcgaggtaaaaaataatgtttgacgtttttagtcagaaaaatcgaattttattacgagaattaatcaaaacagactttaaattacgctaccagggatcagcaattggttatctttggtcgattttaaagcccctgatgacttttacgatcatgtatattgtcttcatccgattcttacgcttgggtggagatgtgccccatttcccagttgccctcttgttggccaatgtaatttggggcttcttctcagaagcaacatccatggggatggtgtcgattgttagtcgaggcgacctattgcggaagttgaacttctcaaaacatatcattgtcttgtctgcgatttcaggagcagccattaactttgtcattaaccttgtagtggtcttgattttttcattcttcaatggggtgacattctcttggacagccttgatggtcattccgttgttttttgagttattcttgatggcgacaggatgcgcactgatcttagcgacattttttgttcgtttccgcgatcttggacaagtctgggaagtactcctgcaagcaggtctatatgcgacgccaattatctatccgattacctttattgcagaccgcaatccatgggctgctaagttggtcatgatgaatcctttggctcaaattattcaagacatgcgttacttcttgattgataaggccaacacccctgtctggcttttggtggaaaataagttcttggtactggttccttatattttaccaattcttatttttgttgctggctttgcttactttaacaaacatgctaagaaatttgcggagattctctaatgacagataaacaaattgcagtaaaagtagaccatgtcagcaagtactttaagttgccaacagaggcaaccaatagtcttcgaactgccctggtcaatcgcttcaaaggaatcaaaggatacaaagaacaacatgttcttaaggatatttcttttgaagtagaaaaaggtgattttttcgggatcctcggtcgaaatggttctggaaaatcgactctcttgaaaattatttctgaaatctatgtgccagaaaaaggtactgtcactattgatgggaaactggtgtcctttatcgagcttggagtaggctttaacccagaactgacaggtcgagaaaatgtctatatgaacggcgccatgcttggcttttcaacagctgaaattgatgccatgtacgatgatatcgtagactttgccgagttgcatgaattcatgaatcagaagctcaagaactactcatcaggcatgcaggttcgtctggcattttcggtcgcgattaaggcccaaggcgatatcttgattttggatgaggtcctcgcagtaggagatgaggccttccagcgcaagtgtaacgattacttccaagagcgcaagaaatcagggaaaaccacgattctggttacccatgatatgggagccgttaagaaatattgtaacaaggctgttttgattgaaaatggtttggtgaaggctttagggagtccagaaaatgttgccaatcagtacagttttgataatacagctcctttgcaacagggaggagaagctaatggagcaggcaattccaaccaggaagaaaaagtcttggttgaaaattttcagcttcagttgttaagctcaaacaaattacgtcctcaagatcctattcagttccagattgattttgatgttcgtgaagatatcaggacctatatcgctctgtctttaacagatatcgatcggaacatttggatctacaatgataattctatgaatcaactgatgagtggaactgggcataaaacggttcattatacttgttcactgccaactgtaaatgacttaaaaatgaaattggaagtgacagtaagggatgaggaagggcagatgttggccttttcagatgccactcagacaccactgatctttatcaatcgagatgatattgctttggatgataaatcagcaatggattcggcaagtggcttaatccaacgcaatggaacatggtcaatgactgactagactgagggaaatatggaaacgacgccttttgtttcgattatttgtacggtttttaataaagagccctggttaaagaagacgattgatagcttcttagcccaacaaacagagtttgcttatgagattatcttggtggatgatgcttcaagtgatggatctcgttctatcattcaggattatcaagccaactaccctgatctgattcgcgccttttatcaggatgagaatcagggaatttctaaaacttgggtttctatctgtagagaagtgcgtggacagtatattgctcgctgtgacggagatgatttttggttggatcctttaaaacttcagaaacaggtttccttaatagaaagtaaacctgattgcaaatggtccaatacagatttcgatatttatgatgaaaaaggaactctcgtttctaaggctggctttgctaatcacacgattccgttagcggatacctatgaaaagatgcttgcaacaagaggctttactatggcctctacatggctagttgatagagatctgatgttagaagtcaatcaagagttagacctaacgacatcagatgatacttttaacctccaattggagctttttcaacggacttctttagcctatctggatgaagcgacggtagcttatactattaaccaaggatcggattctcgtcctactgatttcagaaaactagaacgccgatttcataagttattgcaaacgcaacttgagtatcttgataaatatccaaatgccgattttaaagagatgacgaagatccttttagatcgtaataatacgtatgaaattcgtctttctaaaccgatggattctctttcacacattggaatggagtctgttacaatttattttggggacgaagaaaatacttattcggaagatcgtaccatgaccaaacttcttcaaaaagaagatagtctagcaatagaaattccgaagggaactactgttatccgagtcgatctttctgaaaatcctagttattactctgatgttgaattgaaagattcgtcaggcaaggcttgctcagctatttatagtaatggcgttgttgttgataatttgtatttgtttagcgaaccggatcctcaattgatttatgaagttgaagaagaaggggtgtatcaactgagctataaaatgatttctatagataatccctctgcaccggattatattggaaaagtttttgttgccgaaatgttagattgtcaaaatagtttgaaaaatcttgagacagagttacaagctacgaaagaagaatataatacagtcatccattctcgccgttggacgattccaacaaagatcttgaaattcttaagaataaggaaataacatgcaacgtttacttttatatgtccacttcaataaatttaactttatcagtggacatgtactctaccaattagaaaacattcgtcccctgtactcacgggtggtctttatctccaatagtcagctaccagaaggtgtgaaggatcatttgtcctctcaacagttggtggatgatattcttgagcgccaaaatagtggctttgactttgcggcttggcgggatggaatgaagacagttggctttgaccaactggctcattttgattctgtcaccctcatgaatgacacctgctttggacctctttggaatctagagccaatttatcagcagtttgaaaatgataatgaagtggatttctggggaatgaccaattaccggaaagacaaggattttaacgagcatattcagagttattatcttagctttaaaaaacaggtgctgacatcaagtgctttccatgaattttggcaaggtgttcaggacttcaccaatgttcaagatgtgattgataactatgaaaccaaggtcacaacgaatttcttggatgctggttttcgctataagacgatctttgataccattcatgaagacaccacagggatgctctatccagacttttcttactataatcctacagcgattctcaatcataaggttcctttcatcaaagtcaaaaccattgcaaataacgaagggattatgccttatatttttgatgagttggagcgtgtttcgaactatccattagacttgattctcaaccacatgtctatgattgatcgtccggattatccttatctcttgtctcgtaagtacttgaaaaaacaagaattggctggagatttcggtaaaaaagttgcggttcatcttcatgtcttttatgtggacctcttggaagaatttctagatgcttttcgagactttcattttgattatgacttatggatcacgacagatgcagaagagaagaagcaggctattgaacaaatcctttctaatcgggcacaagatgcgacggttgtggtgactggaaatattggacgagatgtgttaccaatgctgctcttaaaagagcaactctcaaaatacgattatgttggccatttccataccaagaaatccaaagaagcagatttctgggcgggtgaatcttggcgaaaagaattgatcgagatgttggtcaagccggctgatcaaatcctggccaatatggaggctaatccaaaagtcggaatcactatcgcagatattccaaccttcttccgttacaatcgaatagtggttgcctggaatgaagccctcatttcaccagagatgaacaagctctgggaacggatgggagcgaccaagacgattgacttcaaaaatctcaataccttcgttatgagttatgggacttttgtttggtttaaatacgatgctttgaaaccactctttgacttgaatttgacagcagcagatgttccagcagaacctctaccacagaattcaatccttcatgcgattgaacgcttgttgatctatattgcttgggatcaaaaatatgactttaggatctctcaaaacccacatgttctgacaccgtttatcgataataagcaattgaacaatcgtgaggatctccaaccgcatacctttgtggactttaatcaaataggagggattaaaggggccttgaagtatattgtgattggaccagcaagagctgtgaaatatatactaaaaagaatgataaagaaagtgaaataatgaaacggaaaaaagagtttaatgttaaagaatttatcctctcagcattatcgaaagtctcaagaactcagtggtattatggggttactttcgttctattttctttttttaatttttacctagctcagaacaatcttgcagtacataacaaagcaacggggactgtcctacaatatgtcaattttttaggaattctatttggaattagtttcctattgttaattccaatattatcccaatttaattttaaaaaatggtttccattaaagttgattgtcagttatttggtctacaataccctttcttatttgacggaaatcacaatttatttgaataatccgaaatacaaggtttggaattttgatcagaatccattctttagaacggactccttcctagtcattttccttctgtttgctctgacaggtggtttggttctattaagacagcattatgataagctaccgagtcggaaaaaaggaggagaagagattggcgagaactatcagtatctggtcttgtcgcaactcttgatcacctttatcgtaacagacaaaaatttttcgacccttatttataggacagataattttttgtataaagcctttgaaattggcaaatactcagctcagcaattttggttaacaaatgaattcttatacattctatttccattgatttccttacttggattcttgtatacaaaagggcagcgagatttcgtcaagaacaaaccgagtttctctttagtgttcttctctagtaccactattgcaattgtattgaattattttatccaattcagtttaggtcgaacagaacccttcttaggcgttcattacacgattccagatgccatcttatttcaaattctcattctgacagcgatccttatctttgtttacctttgtatcaatcaatattggattgctacctgtctcatttccgttgtatctatagcttttgtcattgcaaattccatcaagtttggcatgaggaatgagccagttttaccaagtgatttaacttggttgaccaaaccaatgacgcttttgagctttatggacaaagggcaaatattttacatctttttattggtggtctttctggtttgtctactgattgtcgggaaaaagtacctctttaaaggaagaattatttcttcatggaaaatacaaatcggagctattgcagtgatgctcttatgttttaagagtgtcaatgggatattcagtgataaagaaaacgggaagatcaaggctaatgtaccaattataagtaccctgaacaattaccaggatattaattggctagggaatacgaccaatgctcgttataaaggattgtcttatgtttggatgaatcaattgacgacggaggttgttccaaaaccggatggttattccaaagaacgtcttgagaaaatagctcaaaaatataccaacttgtcgaatgagatcaataaggagagaagtaactacttaaacgatcaaacggttatctatattctgagcgaaagtttttctgatcctagaaaggttgaaggtgttgagctcacggaaaacccgattccaaatattgaaaacattatgaaaacccacacgagtggtcaaatgcattcagatggctatggtggtggaacagcaaatatggagtttcaaactttaacaagtttgccattctataatatatcaccaactgtttcggtattgtatacagaggtattccctaaaattcatgatgttccttctataagtaatacttattctagcaaaaataaaatagctattcatttagctggtggagcaaattattctagggacattgtatattcaaggctgaattttagcgactttatcacgattaatactaaggggataactgttagaaaagaaggaattagtccgagtgatgaatccacctataatattgtgctagacaatttaaacgacaaaaccggacaattcttttctgtgatgaccatgcaaaatcataccccatggttagaagcaaacccagaaaccttggatgccaaaggtaaaggttttagtgatgaagaaaattcaaaactgactttctatagtcgcttgctttcacaaactgacaccgccacccaatccttcctggaaagtctttctaaaatagataagaagattacagtggtattttatggggatcacttaccaggtctctatcctgagtcggcctttaagaataatccggagagtcagtatcagacagattacttcatttggagtaattttgatgcaccgaaattgaactatcctttggtcaattcaagtgatttctctgctatggtctttgaacagaccaattcaaaagtttcgccttactatgctttgttgacagaagtactgaaaaaagcaagtgtcgataaaaaggccttggaaggagaagcacaagaaattgcagaggatttgaaaatggttgaatacgacttgattagtgggaaaggttacctttctaaagacttctttaaagtcccaaccaacaaatccaattaaaaggagtgctagcaggtaaaaatctttgtgattttggctgtctggctcccttttttttgttttttatgctaaactattagatgggggtacgctcatgattaagatatttggaaaggtccattatcattggcaaccggacttatctattcttgtgacttattggtccattgcagtgattccggtctttattggactggccttgatgtatgagagctctagtgtgccaacgctagttttgttttcgttctttttatttatggtcttgctcgcgattggggtccatcgttacttcacgatctatgaggatgggatcttgcggattattacagccaatccttttactccaatcaaggtgaagattgactcgatcgaaaaggtcgaagtaaataagaaatcgatcaagctcatatttaatgatggatcgcgcagtcgaacattctgtatgcgtaaatggccgaaaaaatactttatcaatgcacttgccttaaatccttattttaagggagaagtaatcctgacggacaatttcatccatgtggattactacgagatgtattatgcaaacaaataaaaagccctcttaatcttttaagagagcacgagtggggcattctttaatagcctcgagaacatcgtttgtgacagggacttccttttcaaggaggtcgtcctcttcagcagcaaatttaacgatgccattgtcatggtaatcaaataattcagaataggtctgacagagaccgcaagcgatgcaacgatctggaattaacgtaactttcatacttctattgtaatgatttttacgagaaaaaacaaggaggaagtcatggcaaaagaaccatgggaagaagatatttacgatgatggagaagaaacattgaaaagaacaagtaagttaaacggaatcaaggcagatcgtctattgacgattttagccattattttctttgtagtagtagtggcgatggtctgcttgttgattttcctttcaacaggcggtagcaataaatcaaaacaaatgtctggtttctacaatggagagactaaggttgaacagaaatcatcagcccctgcagcacaaactgaccaagcggctaaagacgatagttcaaaagatgagaactctgaagaaggcacaatcactgttcaagcaggtgaaggggaagcagcgatcgctgcacgtgctggtatttccattgcccaattggaacagttaaatccatctcacatgtctacaggatcatggtatgcgaatcctggtgatgtcgttaagattcagtaggagttgaagacagcatgaaacaaattcaaattgccattgatggaccggcttctagtggaaagtccacagttgcaaagatcattgccaaggatctaggctatacgtatctagatacgggggctatgtatcgtgcagcgacatatctagctttgcaaaataatctgacagctgaacaggttgatgacctcttagcccttttagatcagtatccaattagtttcggtcgttcagaagaaggagagcagcttgtctttgtagcagacgtggatattacccacccaattcgcgataaccaagtgaccaacaatgtttcatgggttgcagcgcttgctccagtccgtgaaaaacttgtcactctacagcaagaaattgcagcagaggggggcatcgttatggatggacgcgatattgggacagtcgtccttccacatgcagagttgaagatctttttggtcgcttctgttgaggagcgggcagaacgtcgttataaggaaaatgttgaaaagggcatcacagcggatcttgaattgttgaaaaaagaaatcgctgagcgggactataaggacagccaccgtgccgtttctcctttgaaacctgcagctgatgcgattcattttgacacaacgggtgttggaattgcagacgttgttgcatttattgaagaaaaagcaaaaaaacttcttgacaaagaataaaaaacttgatatcatataaaagttgagaaaagcagaagtgagaacttctcgccttgtgacgcaagttgcctggcccctacggatcaagtttcagtaatgaaatacatcatgtagttcgggcctgttttgcaggtccgttctttgtttttctcgaataataaaaaagaggtgaaaaccatagcaaagcaagacttattcatcaatgatgaaattcgtgtacgtgaagttcgcttaatcggtcttgaaggtgagcaattgggtatcaaaccacttagcgaagcgcaagcacttgcggacgacgctaatgttgacttggttctcattcaacctcaagctaaacctcctgttgcgaaaattatggactacggtaagttcaaatttgagtaccagaagaagcaaaaagaacaacgcaaaaaacaaagcgttgtgaccgtgaaagaagttcgtttgagcccagtgattgataagggtgatttcgatacaaaacttcgcaatgctcgcaaattccttgaaaaaggaaataaagtgaaggtatccattcgctttaagggtcgtatgattacccacaaagagattggtgctaaagttttagccgacttcgctgaagcgacacaagatgtggcgatcatcgaacaacgagctaagatggatggacgtcaaatgttcatgcaattggcgccagcaactgacaagaaataatctgtcagaaagttaaaaaaaggagaaaatatcatgccaaaacaaaaaacacaccgcgcatcagctaaacgtttcaaacgtacaggttctggtggacttaaacgtttccgtgcttacacttctcaccgtttccacggaaaaactaagaaacaacgtcgtcatcttcgtaaagcatctatggtgcatgctggagatttcaaacgtatcaaagcaatgcttactcgcttgaaataatcgcgtattcgtaagtaaagaattctaggaaatattggaggaaatataaatggcacgtgttaaaggtggcgttgtatcacgcaaacgtcgtaaacgtattcttaaattagctaaaggttactatggagctaaacatatcttgttccgtactgcaaaagaacaagtaatgaactcttactactatgcataccgtgaccgtcgtcaaaagaaacgtgacttccgtaaattgtggatcacacgtatcaatgcggcagctcgtttgaacggactttcatactcacaattgatgcatggtttgaaattggctgagatcgaagttaaccgtaaaatgcttgctgacttggctgttaacgatgcagcagctttcacagctcttgcagatgcagctaaagcaaaacttggtaaataatgtttataataggctgggcaaaagttgtccagcctttgatgtatgatagaaataactgtatgacgcagtggttgattggtatctttattcgctttttaagctctaaagatgacctaatcaactgtgcgggggtggaaaacgaactcttttttactagtcagagttctttcccactccctttttttcttgctgatttcatgctataatgaaaataatcgtaaccgatatgaggagagatggaggatataaaggtgacacacaatcgactagcatgggatgaatattttgcagcacaggccttactgatttcgaatcgagcgacctgtaatcgagctaaggttggggctgtactagttaaggataataaggtcattgcaacaggttataatggatccgtttctgggacagatcattgtctagaagatggctgtcttatggtcgagggacactgtgtccggacgattcatgcggaagtcaatgctattttgcaaggagctgaacgggggattcccaaaggatttacagcttatgtgacacattttccttgtctcaattgtaccaagcaattgcttcaagttggttgcaagcgggtggtatacattcatcagtatcgaattgatgaatatgccgaatacctctaccgtgaaaaagaagtagaactggtcaatttaccaattgaagaagtgaaacgagctattgcagaggctgattttatttagggaaggcttttagtccatttcacgatatgttagcaatctaattggaaacctgtccaaattaatgtttaagagatagcattgaatagatggctatcatgaaaagaataatggaatcaagtataatggtgttaacggaaaaacataaaaatataagaaaggaaggagaaagtgatgacaaaccaagagaaacattttgaggaaaataaagaacatcgtaagataagtgaagattatcccaattctgtatctgttcagaatcctccaaaagaaaatagcttacattctattcttctttcagtgacattttacttatccattatctatcttgtattgtttttcttttactttgcaccttggggtgatggttggggatttgtcgttttgattttccttggtccaaacttattaagtcttgcgattggggcctttctaattcgactagggatgaagaaggggtataaaagccttctctatgcgagtgttggactctatctgctgtctatcatcttggcttttgatccggactgggaaatatttcgaattgctcccttatgtttaggtattttggatttaatcggaacactcctggttaaagaagagaaaagctcttaatcaaaaaatgggtatggtcaactctactcaataaaaagtattcgggtcgatcaaagagatagttaaatcagttcatccgctctatttttaagcgctattatttgaaagaataactaaaaaggttaggagaaagttatgacagatcaacagaaaaatctggaagtagatacagaaaaagaggcattcgtttcagatgaaagtcttcttcctaacaatgaaatgaagccagaaaagagagttgggacttctgcaatactttattttgccctgttaatcgccattgcttatacagtttaacttttattaggtctctttgcaatgggagcgtgggctggtggctttttggacttcttgtgaatccatatgattagttttgttattgcaactatcctgctttggaatggcaataaagcaactctttatatagcagcagctatttatgttttttcatttattgctgcgggtgatccggattgggtgattaatcatataccacagtttgtggtaggagtgctggtattgattggaactgtattgttaaaaaatgaagagtgatgatagcaggtaggatgttcaatcctatcttttttatttatttagtactgataacgcactgagaaaacggttacaaattgtgttataatttaaataaatggatcgttaaatacttttcttagaaagcggaggagaatctatgtctagaaaaaaatggtatggtatactgctaattcttgaagcaattctttatcttgtttcttatggtagtagtctagtagagagctataatgtccaaaatttaaatggaaatacaccactgatcactacctctagtattttttctatatggaatggaatgattatttgctgggtaatttggagaatcatgaagcagcgtttaaatgttgaaggattgatagctgctcttctcctctcaattacccaactactgatgttttttttaccacctttctccccaacaaatctgatgaacatttcctttgtgctaaatatcatttgtttaatatggatttgcttgcttataaagaatgtagaaatgagggagcttttaaacaattggaaaagtaaagatggttggaaatcatcgatagcttatttagtactatttgttgcctctacaaatatttctccactatttatattgattggtatggatagaacgagtgatatttacgcttttacacttcgatacagtgtaatggagttaatgtttttacttctgattaatgttatgatcacaagtacaagtgagaaacttcagaaagtattttctctcttgctcattttatcttctcttgttgtgataggtgcagtatactctttcatctctcgtataagcttttacggtctcttttatcttctcttatcgatttatattgcttgtcgtgtttttagtttacttgagaaagttgcagttagctgggagtccaaggtgaaagtacaagatctatcatctattgacactaaaccagagatggcggactctcaagtagaaggagacatagatgtaaacgatcagttgaatgctgatatacaatcaaacaatgataaagaaaattcgccaaagaggattattcttcattcgtcttggttatggagcgcccttataatagcagtctgccaccttggtattatgatttttcctttatttttaggaaaccccatgtatctactgatcttatatattggtgccatccattatatttgttttatgattgcgactttcatccttttcatagctatgaggaatggaaatgtgggtctcttaaatacatcagccgtcttatttattgtttccatcataggtacgctagatccttattggacaggtccaaatattttatccttggttttaggagtcctggtatttattggaggtatattatttaaaaatggagactgattaaagtagatagggttgaaaatttttaaagaactgttatcatttaagtaggtggtaggttttcgagtacccattggtacgcggacgcctatcatttttgaagataaaaaaagcaccgtgtgagggtgctagatcttgcctgctgaactcgtcaattgatagataccctacggggtattttttgtgaactttttaggaactttgaggactgtttaagtcagtttaactaggtagtgcatagaccgaaaaagctgatttaatgggctttttgaaaaatcattttccatatcatatgtaatgtgttataatgaagtgttatatggtcccgataaggtggtagaaatcttctatcagtactttgtaactctataacaatattttttaaggggggacatttttatgtcagaacgtaaacttttcacgtctgaatcagtatctgaggggcatccagataagattgcagaccaaatttcagatgctattttagatgctattttagagcaagatccagaagctcacgtagctgccgaaacagctgtttatactggttccgtgcatgtctttggtgagatttcaacgactgcttatgtggatattaaccgtgtggttcgtgataccattgcagagattggttatactaatacggaatatggattctcagctgaaactgtaggagtacacccatctttggtggaacaatctcctgatattgcccaaggggttaatgaagccttggaagttcgtggaaacgcagatcaagatccacttgatttgatcggagcaggagaccaaggtctcatgtttggttttgcagtggatgaaacagaagaactcatgccattaccgatttcactcagccacaagttggttcgtcgtttggctgaacttcgtaagtctggggaaatcagctatcttcgtccagatgccaaatcacaggtcactgtcgagtacgatgaaaatgaccagccagtgcgcgtggatacggtggttatttcaactcaacacgatccagatgtcagcaatgaacaaatccatgaagatgtaattaacaaggtcatcaaagaggtgattccagcttcttatctagatgaggaaaccaaattcttcatcaacccaacaggtcgctttgttatcggtgggcctcaaggggattccggtttgacaggtcgtaagatcatcgtggatacttatggtggttattcacgtcacggtggtggtgccttctctggtaaggatgcgacgaaggtggaccgttccgcttcctatgcagctcgctatattgcaaaaaacatcgtggcagcagggcttgctaagaaagcagaagtgcaattggcttatgccattggggttgctcaacctgtctctgttcgtattgatacctttggtacgggaacagttgctgaaagtaagcttgaaaaagcagcgcgtgagatctttgatcttcgtccagcagggattatccaaatgttggaccttaaacgtccaatctaccgtcaaacagcagcatacggccatatgggacggacagatattgaccttccatgggaacgtttggacaaggtagaagccttgaaagaagctgtaaaataattcgttgaaatggaaaagttagggtcaagatgatcctagctttttttcgttttgaaaattcctacagatggaaaaataggtcgatctgtggtataatagttgcagtattttaaatacattgtcccttttatttccgttgaaaaaacgatagtaaaaggaaaaagacttgaaagagctaataattattaagatgaaaaaaattgtaataaatggaggtcgccctctaaaaggagaggtgaccattagtggtgcaaaaaatagtgtagtggccctgattcctgcaaccattctggcggacgatatcgtgacccttgatggggtaccggatatctcagatgttgcaagtctgattgaaatcatgaccatcatgggcgctaagatcgaacgcaaagaagacactttgatcattgatccacgtggggtgaagaatatgcccatgccatttggaaagatcaacagtctgcgagcttcctattatttctatggcagcttactaggacgctatggtcaagcaacggttggactacctggtgggtgtgaccttggaccacgtccgattgatttgcatttgaaggcctttgaagcgatgggtgccgctatgaccatggatggctctagtatgaaacttgcgactgatggcaagcctcttcaaggagttaacatctacatggatactgttagtgtcggtgcaacgatcaatacgattttagcagcagtcaaggctgaaggtcggacagtgatcgaaaatgcggctcgggaacctgaaattatcgatgtggtaaccttgctcaacaacatgggagcccatattcggggagcaggtacggatatcattatcattgatggtgttccacaattgcatggaacgagacatcaggtgattccggatcgcatcgaagcaggaacctatattgctcttgcagctgctattggggaaggtatccagatcaataatgtcctgtatgagcatttagagagctatattgccaagttagaggaaatgggtgtgcgcatgaccatttctgaagatagtatctttgtagaaaagcaaacaggcttgaaggccatccagatcaaaacgtctccttatcctggttttgcgactgatttacaacaaccgatcacacctttgctcttaacagcatcaggacgtggtcgaattgttgatacgatttatgaaaagcgggtcaaccatgtgccagaattggctaaaatgggggctaccatttcgaccttgaacgaccacattatctatgaagggccaaatcaattgacaggatccagtgtgaaagcgacggatcttcgagctggtgcggctttagtgatcgccggtcttatggcttctggaacaacagaaattacaaatgtggaatacatccttcgcgggtattcagatattattcataaattaagccaacttggagcagacatccagttggtagaggaatagtgacagaactagggatctgatagtggcggctggatacacgaacaatggagtttgaaatgaatatttggacgcacttagctgcctattcactaattgaaacacaaaggttgtatttacgaccttttctctttgaggatgcggaagatttttataagattgcttcgaatcctgataacctacaatttatctttcctgcacaagccgatctttctgaaactcaatatgtactagccaactatttcatgaaaaatcctttgggggtttgggcgatctgtgataaggaaaccaatcagatgattggctccatcaagtttgaaaagttggatgagattaagggagaggctgagttaggctactttttacgcaaagatttttggggaaagggtctgatgacagaagcggtcaaagagttggtctatctatcatttgagaaatttcaactgaaggagcttaagattgtcacccatgttgaaaatgcagggagtcaaaaggtcgctttgaaggctggttttcgtctctttcgtcaattcaaagggagtgaccgctatacgcgtaaaatgcgcgattattatgatttccgcctaggtagaggggacttctatgagtaaacaccaagagattttagactatctcgaaaaattaccgattggaaaacgggtcagtgtccgcagtatctccaattttttgaatgtcagtgatgggacggcctatcgtgccattaaagaagctgaaaatcaaggaattgtggaaacgcgtcctagaagcggaaccatccgtgtcaaatcgcaaaaagctgtactagagcatttgacctatcgggaaattttagaaatcaccggttcagaaatattagctggtgaagaaggtctcgaaaaagaatttaataaattttacatcggtgctatgacggaaaagcacgtcctagactatgtgtctgaaggtgggcttttgatcgtgggtgaccgtactagcatccaacgattggctcttaaacatgacaatgcggtcttagtgacaggtggctttgaagtgagtgaggatgtgattgatctggccaatcaggtacaaatcccagtcatccgaacttcacacgatacctataccgtcgcgactatgatcaataaggccttgtctaatatgcagatcaagacggatatcttgacagtcgagcaggtctatcggcccttccatgagtacggctatctttctgagacggatacggtccgggattatttagatttggttcgaaagaatcgctttagtcgttttccggttgtcaatcagcaccagatggtagtgggcgtcgtaaccatgagagatgctggagataaggcgcctcagacgacccttgataaggtgatgtcacggaccatttttaccactaatttgtccaccagcattgcgacgattagccaacggatgatcgctgaagattatgaaatgattcctgttgttcgtaataaccagaccttgctgggtgttattacgcgtcgggatgtcatggatcggattagcaaggtgcagttttcgagcttaccaacctttagtgagcaaattggtcaaaagattcaaacagagaacgaccattaccaattcacagtggagccaagtatgctggagaaaagcggtgttttggccaatggggtcatgatcgaagtgctgatgaaggttattcgcaagatgatgcaacacagtgggcgtagcttgattgtcgaacagttgatcatcaattttttacaggctgtgcaggtggatgatgtgatccgcattgaaccacaactagttcgacgaaccagacgttcggccttggttgattttagcttgtatttagatctgcagctagttgcgaaagcaaccattacaattaagattaattaaacaaaaagaaatgaggagacaatgattacattaaaatcacaacgtgaaattgaagccatggatcgtgcaggtgatttccttgccagcatccatattggattacgtgacttgatcaagccagggcttgacctatgggaagtagaagaatatgtccgtcgtcgctgtaaagaagccaatgtcttgccgcttcagatcggtgtagaaggcagtctcatggattatccttatgcgacttgctgtggtttgaatgacgaggtagcccatgcttttccacgtcatgtcattctcaaagatggtgatctcctcaaggtagacatggtcttgtcagaaccgcttgataagtctgttttggatgtatcgaaattagattttgataatgtagcgcaagtcaagaaatacacggagtcttatagtggtggcttggcggactcttgctgggcttatgcggttggaaatgtttcgcaagaagtccaagatttgatggacgtgaccaaagaatgtctctataagggaattgagaaagcggtcgttggcaatcgcttgggagatattggtgcagcgattcaagagtatgcagaaagcaaaggctatggcgtggtgcgtgatttggtcggacacggtgtcgggcctaccatgcatgaagaaccaatggtcccacattatggtcgtgctggacgcggtcttcgcttacgtgaagggatggtcttgacgattgagccaatgattaataccggtacttgggagattgatacagatatggaaactggttgggcccataagacccttgacggtggcctttcttgtcaatacgagcatcaatttgtgattacaaaagatggtccagtgatcttgactagtcaaggtgaagaaggaacatactaaaaaatagagaggaaagaatggagctgaaggcaagtgtctggtttcgctctttgctcttttttagtaaaatggggaggtgacgaatgaaaaaggtcctacaaaaaatactgggacagccatttataaaaggcttcgtgcgattttatcagagtgcagagtctgatatcactagcattgctgtagcctattatttgctgatctccattttccctttgatgctgattgcagccaatattttaccctactttcatattcgtcccactcagattcttttaagcttacagaaagttttgccagcctccttatatcgaatagtggcacagatgatttcgagtgtcttgaccaaaccttcgacaggcttactgagtttctcgattatttctgctttgtggatcttctctcagagcattgcctacctccaaaaagcctataacaagagttatggggtggaaaaagagcgtggtattatctgggggcgactctttagcttcctgatcagttttgccttgcagggcttgtttggactctcgctgatcctttccatgtttgggaaaatgatcgttcgctatctctatcggaccttttcatttgatcggacgatttatgtgcgcttactgaatttgacagagccgaccatctatctcttgctttttgttagtctggtcttgctctattacacccttccaaatgtcaaaattccgaaatttagatatgtattgccaggggcgacctttgttgttgctgtcctgtatgcgatcttgaatatcttttggaaatatgtggatcgttatgtgagtcatttcttagatgctcgtttcttcggttcggtcgtcctagcggtcatcatgttctggtttatcttggtggcaaaaatcatgattattggttgtattttaaatgccagtatccaatttgctagagaagcaaagttccaaacgcgcagtggagaaattgtctctaagttaaaatcagaagaagtggccttccggcatagagaaacttcattaaaattaaaacaacgattacgtctaaaaaatagagataaaaagaaagaatagaaatcagatggtatctggtttctttttttgctgatttttattgcatttgcaacaaaaatgtgttatgctattgtcaataggaaaggaggagtaagatgagtattttgcgtgagattggcatcattgcgagagcactggattctatagcaaatattgaattccgagatttggatctggcgcgtggtcaatacctctacttggttcgaattgccgagcaacctggaatgattcaggaagaactctctgaagtcttgaaagtagatcgatccaccgttgcaaggtctgtaaaaaaactagaagaacgaggcttgattcaacagcgtccaaggggggaaaatcttaaaatcaaggaatgggaattaactgaaaaaggtaagcagatttaccccttcattttaggggagcatctttactctgagacaactgccttaaaaggattttccaaagaagaagtcgcacagttagaggagtatctcatccgagttcgagagaatatcaccttggattgggagctagtcaaaaaaggtcaaaaaagaaattatagtgaggtaaagcaatgaaagtgacagtcgatcaagcattttgggatttatttccaacagctagaattacagtgatgtctttgtatggtattgataatacagtagatgaagccaaggatccttatttcaaagaattgttggacaagggtaccaagagagcatgggaatttattgatgaagaaaactatacccagagtgagttcgttcaagagtggcgccaagcttttagcaagtttaaaacaaaaaaaggagcccgatcttcaatcgaggcactcttaaaacgggttcaccagggacgtgaattctatccgattaatcctttggtggatctttacaatagtgtttctatggcttatgcccttccttgtgggggagaagatatgaataaattggtgggtggactctctctaggacaagcgaaaggaggcgaacctttctttccattaggtgctgaagaagatgctccagctttggaaggggagattatctactacgaccaagacggagctgtttgccgttgcttgaattggcgtgaggcacaaagaactatgttaacagaagataccaaggacgctattttagttattgaagccatcaatgaggagcaggccaaacgggcacaaacagctatgcaggaattgaaagatctagccaaagattattttggggttgaaggcaccatctatcaattaagtgcagagcatgcaagtataaaagtttaaaagaataaggctgaaacaatcgtttcaagccttgtttttatttttaaagacaaagagtttactaaatacgtaattgaggactacaatggccacttgtgcaaagagggtttcaatcagattgatctgacttttgttattgtggacgaattgcccgataattcctgggaactgcttgacaaaaatctcggtcaaggccatgtccagtacaaaggtcccagagcgcgcaattgcaaatcggatcaagcgctgaaaccagccctttctttcttgtttaaagacaatggtatcattggttgcaaaggcaaagaggatcccagcaatgtttccaatcgcggtcgctaatcgttcatcacgagacacttgatagatgaagaggcgggttccgacggaaacaatggttgtggcaaccccaaaaaagagataggataaaatctcattatcaaaaaattttttaattagtgttttcataaattcagtctaccataaaagctcaaaatatgctatacttgaaaggttgaagaaatcaaaccttcaacccttggtgcttaagatcctttcgccaagcatattacacgcgggaaaaccgctaaaggagaataaatgaaacagttaactgctcgtgatatggcacaaattgccattgttgctgcgatttatatcgtattgaccattaccccacctctcaacgctatggcctactatggctatcaattccgtgtttcggaaatgatgaatttcttagctttttacaataagaagtacttgattgcggtgacgcttggttgtatgattgctaacttatttagttttggatggatcgatgtctttgtcggtggaggttcaacctttgtcttcttaggacttggactcattctatttggtcgattcaaaaacaagttcttgtttgacggtcttattcgcttggaccatttcttgtttgcgattttcttttccatctccatgtttacgattgccttggaactatactaccttcaaggccaaccattcttctataactggttgactatgggattgggtgaattcgcatccttgatttttggagcgattgtgatcaatcaactttctaaacggatcgattttacaaaataagaaaagggagctttggctcctttttttaatgctaagaatgcagtaaattcaaggctaaattaagattttatgataaaataagaacatgaaaaccagaatgaaagaattagtggaattactcaatcgatatgcttacgagtattacacaaaagacgctccatctgtttcagatagtgaatatgatcaattatatcgggagttggtggaactagaaaccgctcatcctgatgagatcttaccagagagtccaactcaccgtgtaggtggggtggttttaaaaggctttaccaaataccagcaccagtatcccctttatagtttgcaggatgctttttcgcgtgaagaattagaagcctttgatcagcgtgtccgtaaggaatttccttccatcagctatgtatgtgagctgaagatcgatggcttgtccatttccctcacctatgaaaatggtgtccttgtaacgggggcaacacgtggagatggttctgtcggtgaggatattacagagaacctcaagcgggtcaaggacattcctttggtgttaccagaaccagtgaacattactgttcgaggtgagtgctacatgccacgagcttcctttgatcgggtcaatcagatccgtcaagaaaacggcgagccggagtttgctaatccacgaaatgctgctgcaggaacgcttcgccaattggatacgaaaatcgtggccaagcgaaatctagcgaccttcttgtatcaagaagtgagcccgacggatcaaagcagtcaggaaggcgtgcttgagaaattagcccgcttagggtttgtcgtgaaccaagagcgggtgctggctgaggatatggaacaaatttgggactttatccaaaaagtagctcagcttcgagaggatcttccctacgatatcgatgggatcgtcatcaaggtcaatgacctagctgttcaagaagaactaggttttaccgtaaaagcccctaaatgggctgtcgcatataagtttccagctgaagaaaaagaagcgaaaatcttatcggtggattggacggttggccggaccggagttgtgaccccaactgccaatctaacgccagtccagctagcaggaaccactgttagtcgggcaaccttgcacaatgtggattatattgctgaaaaagatattcatcaggatgataccgtcattgtctataaggcgggtgatatcattccagcggtcttgcgtgttgtcaaagataagcgagtctctgatcaagcattagccattccaactcattgtccgagctgccagagtgagttgcttcattttgaggatgaggtggcccttcgctgtatcaatccgctctgtccagcacagattaaggaaggattgaaccactttgcaagtcgggatgctatgaatatcacaggcttgggtccagctgttgtagagaaactctttgcagctcagttagtagaggatgtggcagggatctatcgcctaagcgtagaggatctattgaccttagaaggctttaaagaaaaatctgctgaaaaactccatgaagccattcaagcttcaaaagagaattcagctgagaagttactctttggtttggggatccgccatgtcggtagcaaggttagtcaaatcttgctccaagaattccatgacctcgatcaattggcttcagctgatccagaacgaattgccagcattgacagtctcggtatggtcgtggctgaaagcctcaagcgttatttcgcacaagaaggatccaagcgcctattgcaagagcttaaagaagctggtgtcaatatggactatcttggtgaaaaagtcgctgctgatgcggccctatcaggaatgacagtcgttttgactgggaagctagagcgactcacacgttcagaagctaaggcaaaattagaaagtctgggcgctaaggtaactggatcggtttccaaaaaaacagatttggtcgttgcaggtagtgacgctggtagcaagttaaccaaagcacaagaattaggaatccaggtagaagatgaggcctggcttgaaagtttatagaggatctttatggtagaacgaatcaaaaaagcccgtttaatttataatccgacctctgggcaagaaattatcaagaaaaatattgcggaagtcttggacgtactcgaagacgtgggctatgaaaccagcgcttatcaaacgactccagaaccattttctgcccaaaatgaagcagaaagagccgctaaagcaggctttgatttaatcattgccgctggtggagatggtacgattaacgaagtggtcaatggggtcgcaggtctggaaaatcgtccgcagatggcctttattccgaccggtaccaccaacgactatgcgcgtgccttgaagatcccgatgggagatcctgtggcggctgctcgcattatcgaaaagaatcaaaccattcagatggatattggtcgtgcctatggcagcaagtatttcatcaatattgctgcagcaggaaccatgacagaattgaccttcagtgttccaagtagtgttaaatctcgcttgggttactttgcctatgtggcagaggctgctaaaatgttgccacgaaacaaggctcgcaaggtgcggattgagcacgacaatggtgtctttgaagggccagcgtctatgatttttgtggccttgaccaactccattgctggttttgaaagtgtcgcgccagatgctaagcttgatgatgggaactttaccttgattatcgtaaaaactgctaagctctttaacatgttgtccttgatgattcaggccatcaatgggggcaagcatgtgcacgatgaaaatgtagaatatctcaagaccaagaagttgacgattgaaatgttagggaaaaatgctcaaccgttccgcatcaatctagatggggaatacgggggagatacgccggttgaattggaagtcttccataatcacttggaattctttgcaaatattgatgaaatcaacaacgatgctttggttcacccatctgaagaataaaaacaatagttggagtcatgtacgtgttttacaagcggatggttccttcggtattaaattggaaataggaaaatgttatgcgacaataccatgtaaaacttcattttcataagcaaaaaggaaattattttgcctatgatatgtggcagtggcaggatcaagtagaaggaaaatcagtctctttctccaagttggattattttggagtagagggaaatctggtatacgagagtgaggatgccttgaaccgaggccatgtcctggttaaagaaggggattggctcaccaagacccgtgattttgaaatcgaactcttaccagaagggcatgttcgagaagtgtggattctcgatggagacgatacagtctattattctttgcaagctgctttgacgagtcatgcatacagccatcgtcagcctcatgcctacgatatggcaatgcgtcctagagagtttgatgctaaatgggcgtatcaaggatggctcggtcatcgggaggaagaaggggagcattgctttaaactatgggctcctactgctaagaaagttgaattgttgctctatcaatctacagacttggatgcgcctatctggaagagtatgccgatgacacgtggcaaacaagagtctagctaccacccagaaaatacccatggtgtttggattttagattttttaggaaatttaagtggcatggcctatcaatatcgtgtgcattttgaacaccatactcaagtgacgcgtgatccttatagcattgcaacgacagcggatgggatgcgctcagccattctttcaagagtagatcgtcagtttgattggggcactaaaaaaggcgccgatgcgactccctggcgcctggacaatccttgtcaagcagtgatctatgagatgcaccttcgggatttgaccaagtcaccgacatcaggtgtggacgagtctttgcgtgggacctatctgggggcttgccaagaaggaactgtcaatagccatggcgatgtgactgcctttgattatatccgtcagttaggggtcaatgtcgtgcaattacagccgatatctgatcgctataaacagtacgatgaagaaggtcgtgtgacctacaattggggttacgacgttcagaatcattctgcaccagaaaccagtttttcaacagatccatccaatcccaaacaaaccatgaaagagcttaaaacgatgatccgggcttatcatgaagctgggatttctgtagtcatagatgtggtctacaatcatacctactcaacggagcatggtcctttccaaaatacagttccggattattattaccggatggagccagatgggcgcttccaaaatgggacaggtgtcggtaatgagacggcaagtgagcatgaaatgtatcgcaagtacatgattgattcccttacgcactgggtaaaagagtaccagatcgatggtttccgctttgatttgatgggcattcatgatgtgacgacaatgaatgctattcgggaggcgatggatgctctggatccacgcattcttctttacggagaaggttgggacatgggaaccggtctcgcaccagaggacaaggctaagaaagacaatgcggcgcaattgccacgtattggattctttaacgacacggagcgcgatgctattaaaggagctgaggtttatggttccatcaaacgtggctttgtcagccgaaaatcaacagagaatatcgttgcgcgtgctgtcctaggtagtgcggagctgggtcattatttaagtccgaatcaggttttgaattatgtggaggctcatgacaattataatctctatgacttgcttcagaccctccatccaaatgaagaagtagcaggcttggtcaagcgctcagagttggctacggccatgaacctgctcttccagggtatgacctttatgcaattggggcaagagtttatgcggactaaattggtagcgacaggtcctgatggagagatcacacctttggatcgtgagcgggccatgaattcctacaatgctccagattatgtgaatcaggttaattgggatctggtcagtcaaaacaaggaatcaattgcctatatccgaagcttgatcgccttgaagacaagtcttcctgtcttaggacttgaaagctatgataaaatctaccaacaagtctttattcaatctgcaactgataccagtggccttgtcatctatgaattaacaggagacaagaagtacttggtcatcttcaacgccagcggacttccatattacctccaaaattcaaataaattgaaattgatggttgggaatagtcgtcataaacgaccattctacgtggagaatttaacagcttctgtttttgaagtcctagactaagtttttttaaaagaaatcataaaatccctgagtttttaaactcagggattctttttatttagaagaactgctactggtctctgttgaggaagaactatcgtcttctgggtgcaattctttataagttggtgccttgaagagatcaacggtagactggttgccacgttggttataaaggctggttgatttgtcacctttttccttttcaatcttcttcaatgccttgaaggaattggtgtaggaataatcttctggattgacttttccaagatcattgcccttgaagaagcgaaggagatcaccggtctggatgctatcgctaatcttcaattgcaggttagcagcttccctaatcttatccagttcttccttggttttttcgtctgggttggtgatttcctcacctgttttagtgtaataggtccggccactatagctcgtatactctggagttacaaagtagttagcggagcggaaggcgacgatttgatcatgttctggagagagcatatcttgaccaacttggaggaatttattggattcaatacctagcaaatgttccaaggttgggagcatatcaatttcgccaccgtaggtatcaatgatgccacccttatccatacctggaataactaccatataaggtacgcgttgcaacatggcattgtcataacttgaccacgtttcagagttcttaccaagtagaggagcaagagctgggttgcgggagtttgaaattccgtagtggtccccatagagaacgatgatggaatttttgtaaagaccagattctttcaggtaatcaaagaaggctttgatcgaagaatctaggtagttagcggtcgcaaaatagccattgatggtttcgtcctgagtcttagctagagggaaaccaagatcatctcctgacaagctggttgtataaggatagtggttggaaaccgtaatgaacttggtatagaaaggctgttgcaatctttctaggtatttgatggaatccttgagcatgtatttgtcattaagaccatactggaaggaattgctgctgttttgtttggtgaagtagctggcatcaaagaagtaattgtagccccattgtttataggcggtatttcggttccagaaacttccagcatttccgtggaaaacagcgctcgagttgtaaccattttttgaaagaataaatggtgcagcctgttgggtattggttccaccatagttcaccataaaggaaccttggttgagtccgaagaggcctgtttcaatcatggtttcagcatcggacgttttccctgccttaacttggttaaaaacatttgaaaaggcaaaggtttctttcgagtggtaaagtgagtttaagaaaggtgtcacttcatattctttatcgtctactttcaacttgtaatcgatcaagaattgttggaaactttccaagtgaatgtagatgacgttacggcctttggccattccaaagtactcaggattaggcttggcataatgctgttggatatattcttccaccggttttaaatctgcttcggaggctttggaacgttctttgttagcagcataggtctgattagcgctataacccagaaaggctggtaagcctagggcacgaacgacatagtagtttgagaacccacgagtcaagagctcaggtcggtcaatttctgcgaggaaaaggttggccgaaaagagcatagccgataaagaggtaaccgcaaaactagctcgtttattgaagggacgattgtccattcgaatccatttcttaaagaagaagaaagctagaatagggaaatctagaatgtagatcacatcccaagggcggaacaattctaaagcagcagctccgagaccggcagaaaccttgctggaagccaacatggtattgactgttacgaagtctgtaaactctcgataatagatggagttggaaatcaaccaaataaataagagaaggtagatcccaaaggccaaactataaaagagtttggttcgtttgatataaagtgcaagaccaatgaagagcagactgatcggcaatgggttgatcactgctagaaaaatctgatagggtccttgaatgtctaaattaaaatcaactgaataggcccacatggttttgaaccagtagagcaacagaagggtcaagacaaatcctagtctggtactcatgaaattgagtatcgaattcgtaatttttttcacaaaatgttacttccttgtcttatttcctaaaaattttcatatacaagtataccacaattttatggagaaagaaaaaaatgactgtaaaggagaggaaagaaataggaaagatccggcattttatatcatttgaagctaaatgatgagaactaggataaaatggtaaaaaaagttccagtaaataaagcctctctttgtgaaaactgcagacttttgctataatagagggtatgaaaaaactcacagtcagtcggcaagtagctcgaaaattaaaacaaggacaatcccttcttgaaaagcaagattttgagtcacttcctgctttggatcaagaggttcaattgctttcaggagatggacaatacctcggagtcggatacttatctgaacaaaataaagggattggatggtttgtttcacaagagttggtcgcttttgatcaagacttttttaaaaagcttttcatcaaagccaagcaataccgtcgttcttattatgcggatgaaacgacgacggcctttcgtctctttaaccaagatggagatggttttggtggctttacggttgacttatatggtgagtttgttgttttttcttggtacaatcccttcgtatttcagattaaggaaaccattctagcagcctttcaagaagctttttcagaagtccgaggtggctatgaaaagattcgctttaaaggtttggactatgaatcggctcatgtctatggagaagaagctccgcaagaatttttgattcttgaaaatggggtctcttaccaagtctttctcaatgatggcttgatgacggggatctttttggaccagcatgaagtccgaggaagtttagttgaggggctcgctgctggtaagtccttgctcaatatgttctcttatacagctgctttttctgttgcagctgccatgggcggagcagtagagacgacttcggtcgatctggctaagagaagtagagaattatcagaagcgcattttgtggcaaatggcttggcgctggatgctcatcgttttgtcgtgatggatgtctttgactattacaaatatgccaaacgccatgacctaagctatgatgtgatcgtgcttgatccgcctagctttgcgcggaataaaaaacggacattttcagtcgctaaagattaccatcgattggtcagcgaggcactcgagattttaaatccaggtgggatcttgattctcagtaccaatgcggcaaatgtgaccaaagaaaaatttaaaaaacaaatcgaaaagggatttcaaggccgtaagcatcgctatctagcggaatacggacttccgggagattttcgatggaacaagaaagaagaaagtagtaattacttaaaagtatttacgattagggtggatgtatgaaattagttgtttcgattatgcctcgctccttagaagaggcgcaacaactagatagttcgcgttacgaggatgcagatgttattgagtggcgtgcggactttttagaaaaaagcgagatcttaactgttgctcctgcagtttttgaaaaatttgctggacgcgagattttattcaccttgcggactcgagctgaagggggagagatggagctgaccaacgaggaatatgttggaatcctgaaagatattcaatccatctatcatccggattatatcgatttcgagtattatagtcaccgtgaagtctttgaagagatgttggaattttcaaatcttgttctcagctaccataacttccaagaaactccggaaaatatgatggagatcttatcggaattgaccagcttttctccaaaattagtcaaagtatctgtcatggcccacaatgaacaagatgttcttgacttgatgaattatacgcgtggtttcaagacactgaaccctgagcaagaatatgtaacgatttccatgggcaaggtcgggaagatttcgcgcttgacagctgatttgacaggttcttcctggtcttatgctagagttggagatgaaagtgccccaggtcaaattcctcttgaaaatatgagaagaattcgggagttattaaatgaagattgacggatatactcggatggcagctgtcattgcccatcccattcgtcatagtatctctcctttcattcataatctagcctatgaattaacagcgaccaatgctgcttatctagcttgggatattgctgaagaagacttagaaagcaccatcagccaaattcgtaagttggatatgattggggccaatatctccatgccctacaagcagaaggtctttccttacttagatgaagtggatgagatggcccgaaagatcggttctgtcaatactatcgttcaccgcgatggtaaacttaaaggctataatacggatgggattggtttctttcgtagtttacctcctgctttctctattaagggaaaaacaatggttctcttaggagcaggtggtgcagctttagcgattattgcacaggcaattcatctaggtgtaaaacgaatccttgtctttgtgagagaggagagattggttcattatcgttcaatcgttcagttgattgaagatggctttgattttttgatagaattgtatgcgattgagaaaaatgaagacgttcaaagctcctttaaacaagccgatctcatcttaaatgccactggtgttgggatggatggtcagtctcttccgatagcgaatcacttgacgtttcctctacatgccttaatcgtagagatggcctactatccggcagtgaccccctttttgcaactagcagtgaatcaaggaaaccagagggtaaatgggttgggaatgcttttttatcaagctgaagcagcctttgaattaatgactgggaaagtatttcctacagagtctgtatgggaagcattgacaacagaatatcgccaatttgtatgtgactaagagaggggtttaccttttcctattgaaaaagctttatgagattagaacaagacctgatttttaaaaaaacagtcttgctctagtctctttttcattttgattgagacatgtgccctatttcatgataagatagaatcaaagaaaaacgtgaaggagattcctatgaacgtatcggtacctattccaggacattcctatgatattgtgattgaaagaggtggtctcaaccaggttggagattggttgcgcactctttggggcgataaaaaagtcgctatcatttccgataaccgcgtggctaagctatatgcctctatcgtagagaagagccttgagaaagctggttttcaagtggtgcgctttgagtttcttcaaggggaagccagtaagaatctaaccactgtttcaaaagtctatgactttctagctacccagggcatgacgcgcagtgatggaatcgttgctcttgggggtggcgtagttggtgatttggctggttttgctgcctcgacctatatgcggggaatttcctttgttcagatcccgactagcttgaccgcacaggtggattcttctatcgggggaaagacgggagtcaacacagcacttgctaaaaacatggtaggaacttttgcccaaccagatggtgtgtttattgatcctgaagtgttgagcaccttggggcaacgtgaattgatcgaggggatgggcgaagtcatcaagtacggtctcatccaagatactgaactttgggaagaattggaagccatggagggttctgtccagagtattttagagcatgcagagagcatcatttctcattcttgcctggtcaagcgagaccatgttgtggcagatgagctggacaatggcattcgactgtatcttaattttggtcataccattgggcatgccattgaagcgacagctggttatgggcaggttatgcatggagaagctgtcagtatgggtatggtgcagctgtcccgagttgcagaagaaaagggcttgatgccaaagggaattactcaaaaaatcgaagaaatgtgccggaaatttggccttcctgtgacctatgagaactgggataaagaagccctttatcaagtcttgacccatgacaaaaaggcgcgtgggacgaacttgaaattagtcattgttccagagttggggcaagcagcgattcatcaaatccctcttcaagaaatgaaggactttttagaaagaaaggaataaggtcgtatgagatatttaacagcaggagagtcccatgggcctcgattaacagccatcatcgagggcgttccggcaggccttcctttatctgaagaggatattgataaagagctcaaacgtcgacaaggtggctatggtcgtggtgctcggatgaaaatcgagagtgaccgtgtcgagatcacatcaggggtccgtcatggcttgaccatgggaggtccgattacgctgaatgtgaccaatctggatcaccaaaaatggctggagatcatgaatgtagcaccggtcgaagagaaaaagaaaaatctgcgtaagatcaccaagccacgtcctggtcatgccgatctagtcggagggatgaaataccgttttgacgatcttcgtaattccttagagcgttcttctgcccgtgagacaaccatgcgtgtagccgttggtgctgttgctaaacggattttagaagagatcggcgttgaagtagccagccacattgttaattttgggggaatcgagattgcaattcccgagaatctaaccgtttcagaaatcaaggaaaaggcaggtcagtcggaagtttcgatcgttgtgccagaacaagaagaagccgttaaggcctacattgaccaagtgaaaaaagatggcgataccatcgggggaattgtggaaaccttggttggtggtgtgcctgtaggactaggatcttatgtgcaatgggacaagaaattggatgccaaaatcgctcaaggagtggtctctatcaatgcctttaagggtgttgagtttggccttggttttgacgcaggtcgcctaaaaggcagtcaagtcatggatgaaatcatctggtctcaggacaccggctatacccgtcgcaccaataatcttggtggttttgaagggggtatgaccaacggtgagcccattctggttcgtggcgtcatgaagcctattccaaccctctacaaacccttgatgagtgtggatattgaaacccatgagccctataaggcaacggttgagcgcagcgacccaacggctctacccgctgcaggagtggtaatggaagcagtggtcgcaacagtccttgctacagaagtgcttgagaaattctcatccgataacttggaagaattgaaagaagctgttgctaagcaccgggactttacgaagaatttttaagagaaagagttttcctttggagaagaaagttgtatatattgcaggcttgggcttgattggtgcttcactcgcgctaggcattaagagagcccacccaaacgtgaccattcttggttacaatcgaagtgaagcctctcgaaccatcgcccttgaaagaggaatggtggatcaggtgacgtatgatttcgcagcctttgcccctttagcggatatcattattttggcccttcccatcaagcaaaccaagtcttacttagaaaccttagctggcctgaatttgaaagaccgggtactggtgacagatgcaggctctaccaaggcagaaattgtcgcacaagctgaaaaggtatttacagacaaggctgttcgctttgtgggaggacaccccatggctggtagtcataagacaggtgctgcagcagcagatgcaaccttatttgaaaatgcctattatattttcactccttccagcttgacgacaggaggtgccatggaagagttgaaagagcttctgagtggattgggatcccgctttattgaaatcgatgccgaggaacatgatcgggtaacctcccagatcagccattttccccatattttagcctcgactctggtcgagcaggccgtagcttatggggaagagcatgaaatgacccgtcgttttgcggctggtggctttcgggatatgacacggattgcggaaagtgagccaggcatgtggacttctattctcttgtccaaccctcaagcgatattagagcggattgcagatttcaaagagcgtttggaccaagtggctgaaaccatccaagcagataacgaggaggctatttggtcctttttccaagaagggcgcaagcaccgaaaagaaatgcagatccatcagcgtgctggacgcgatagtgcctatgatctctttatcgatgtccccgataaggaaggtgtgatcctcgaaatattacaacttctacaagggatttccttagtcaatattcacatcaatgaagaaaatcgggaggatatccacgggattttgcagctgacctttaaaaatgcagaggatcaagagcgggctcaaacattgatcagccaggcgacgtcttataccgtccttgctcgctaggtctacagaaggatttgcatcaaaaggcctgcttcattttaggaatattgaaggaaaaacagtataatagaagtatcttatcagtaaaggagcctagaaaatggcaaatatttatgatgtagcaaatgaactctctcggacccttcgagatcttcctgaatacaaggctgtcgtagaaagcaaacaagcgatcgaagcgaatccagaagcgaaaacgctgtttgacgaatacgtcgctttccaaaatcaactgcaaggcttgatgcaatcaggtcaacttccaacagaagctgtgcaacaagaaatgaaggactatatggaaaaaatccaagcaagtccgattgtgaatgaatttttcaccaaacaacaacaattgtctatttatcttgcagatcttgaaaagatcatctttgagccgattcaagatttatacaaatagaaatttctaccagagttgtcatttcgactctggtattttcgttcgccactagaggaaaacaagctcaaaaaatgcttggaaacattcgttttttgttccaaatttttgatcaaaaattgaattcatgtcctatttatgatagaatatgtggaaaagcactctggagatggcaatgaaattaagaaccaatagcaagggtctaaagggaaccattcgtgtccctggtgacaaatccatcagtcaccgatccattatttttggaagtcttgcaaagggcgaaactaaggtctatgatatcttgcgaggcgaagatgtgctttctaccatccaggtgtttcgagacttgggagtttctatccaagatgatggggatgtgattcggattcaaggagtaggctttcaaggtcttcaagccccgacatctccccttgatatgggcaattcaggaacgtctattcgtttgatctcaggtgtactagcaggtcaggattttgcagtgaccatggttggagacgacagcctttccaaacggcccatggatcgtgtcgcgattccactgcgtcagatgggggtagagattgctggtcagggagagcgcgattgcccacctttacatgaaaaagggacccatcagcttcaacccattcattaccgtttgccagtggcatcggcccaagtcaagtctgctctcatttttgccgctctacaagctgaaggtgaatcgacgattatcgagaaggaaaagacgcgtgaccatacggaggatatgattcgccaatttggtggagagatccaggtggatggaaaaaccatccgcatccaaggtggacaagagttccaaggtcaagaagtcattgttcctggagatatttccagtgcagccttttggttagtggccggcctcatcctgccagatagtgtgatcaagattgaaaatgttggcatcaaccaaacgcggacagggattctcgatgtgattcaagaaatggggggagatctcaccatggaggatcgcgatgaaaaagcggtctctgcaagtctcactgtcaagacctcgtccttaaaagggattcggattgatggggagttgattccacgcttgattgatgaattgccgattattgctttactagcgacacaagcaaatggtcagaccgtgattgcggatgctgaagagcttcgtgtgaaagaaacggaccgcatccaggtcgtagcagatagcctcaatgctatgggagccaatgtcgtgccaacggaagacggcatgatcatcactggaccgactcccctacatggagctgacttagagacctttggagatcaccggattgggatgatggctgccattgctgccttattggtgagtgaaggaaatgtgatgctggatcgggcagaggccattaacaccagttaccctagtttttttgaagatttggagaccttactgcatggctaaaattttacttggttttatgggaacaggtaaaacgaccgttggtcgcattcttgatccaaaattccatgatatggatgaattaattgttgaagaaatcggcatgtcgatcaatgactatttcgcagtggaaggagaagcagcctttcgtcgtcgcgaggctgaaatgctggagcgtttattggaaaacgaggcagccattatttcccctggtggagggattgtcgtcaatcctcataaccgtgcactcttggaaaaaaatcctcacaacatttatctgcgggtagattttgaaaccttgtacagccgcattcaaaatgacaaagccatgcaacgccccctctttttaaaccacaccaaagaagaattcaagaagatttttgatggacgtttgcctttgtatgaggatattgctacccatattgtggatgtcgaggacaaaacacctgaagaaattgcggagatcattcgatgcttgtaggctatcttggtcccaagggatcctttactcatgatgtggttactcatagctttccaacttctgaacgaatcgcctatcggacgatcacagatgtcatcaaggcttatgagaatcaagagattgattttgcagtcgtccccgttgaaaactctatcgaaggcagtgtccacgagaccatcgattacctctttcaccaagggaccatccaggccgttgcagaagtggtctatcccatcaagcaacagctcttggtggctagaaaagatcggcctattcgaacggtctattcgcatccacaagccttagcccaagggaaagcttttctaagggcccattatccagatgtggccatggaaatgacggcttcaacagcctatgcagcccgctatgtagcagaacatccagaattggagattgcagctattgcccctctggcagcagccagtgagtacggtttggaagtccaggccaaagatatccaagaaatcgaggacaactacacgcgtttttgggttttaggggcaaaagagcccttgatttcagaaactttaagtccggtccttcaaaaagttagcttggctttaaccttgccaagtaacctggctggagccctctataagggtttgtccacctttgcttggcggggaatcaatttaaccaagattgaaagtcgccctctaaaaacagctttaggagaatactttttcattattgacctcctaaatgaagcgcctgatcttgtgcactttgcctatcaagaattagacagtctgggcattcagacaaaagtcttgggtcagtatcaggtctataccataaaagataacggaatggagaaaagatgagtaacgaatccaactttctatctcaccatgagcgaaagcgattagagtacttatactcaaattttcattatttgaatgaacgagaacaactagaatacaattatttgctcaaaaaaagccaaggagtttatgaggaaacagaaccccttcaacagcctgaagtagctgctactgaagaagtgcaaggggagattgctgaaccgattggtgaccttcctgtttaccaatcacgtagcaaaaagtctaagaagaaagcagttgctgcgacgagcgatatacctaagaaaccacggaaaaagatccgcgtcaaacggattctcaagtggcttgctctctttttcttgctcattatcggtggcatggtcttcatgtttgtgaagggcctcaacagcaagccgacaggtccagatgccaagccagctgtcgttgagaaatttaacggcaagaagtcgcgagatggggtcaatatcctgattttggggacagatggtcggatcggtgagaagtcagatgagacccggacagactccatcatggtggtcaatgtcaataacaaagaaggtaagatcaagatggtcagcttcatgcgggatacactggtccatatcgatggtgtcagccagcaaaatattcctgaatatgatggctactacgaccagaagctcaatacggccttcaccatcggggagcaaaataacaaccaaggggctgaattggtgcgtcagatgctcaaagacaactttgacattgacatccaatattacgccatggtcgatttcaagacctttgcgacagcgatcgatacgctcttcccaaatggggtcgagatgaatgcgcaattttcaacggttgatggcgaaaaggtcagtgaagtagaagtaccagatgatttgaacatgaaagacggtgtcgttccgcagcaaaccatcaaggttggaaaacaacggatggatggccggacccttcttaattactcgcgtttccgtaaggatgatgaaggagactttggccggacccgtcgccaacaagaggtcatgtccgctatcatgcatcagatcaaggatccaaccaaactctttacaggatcagaagcccttgggaaagtctttgccatgacgtctaccaatgttcctttctccttcctattgaccaatggacttggactagtcggaagtgctggaaaaggaattgaacgagtgaccatcccagaaaatggggattgggtcgatgcctacgatatgtatggtggccaaggattgctcgttgattttgacgcttacaaaaagaaattgtaccaaatgggactgagatgatataataaggggataggagttttggactccaccccttttaatttgtagaaagatagaacaccatgttaaagaaaaatgaaattgtagacgttgagattgtcgatttgactcacgaaggagcaggagtggctaaggtcgatggcttggtcttttttgtggagaatgccctgccaggagaagtgatccgcatgcgcgtgctcaaagtcaacaagaagatcggttacggaaaagtagaggagtacttggaaaaatcccctcaccgcaatgaagagctagacctggcttatttgcgaagcggtattgctgacttggggcacctggcttatgcggagcagctgaaattcaaggccaagcaggttaaggatagtctctacaagatggcaggaatctctgatatcgaagtgcccttgaccttggggatggcccaccctgtccaataccgcaataaggcacaggtccctgtccgtcgtgtcaatggtcagatagagacaggcttctttcgcaagaactctcatgatttgatgccgattgaagacttttatatccaaaatccagtcattgaccaagtggtcttggctcttcgagatttgattcgtcggtttgatctcaagccttatgacgagaaggaacaatcaggcttgattcgcaatctagtggtccgccgaggtcaccattcaggagaaattatggtcattttggtcaccactcgtcccaaggttttccgtgtggaccagttgatcgagcagttgatcaagcaattcccagctattaaatccgtcatgcaaaatatcaacgaccagaataccaatgccatttttgggaaagaatggcgaattctctatggtcaagactatattaccgatcaaatgttgggcaatagcttccaaatctcaggcccagccttttaccaggtcaataccgaaatggcagaaaagctctatcagacagctattgactttgcggagttgagagcagaggatatcgtgattgatgcctactccggaattgggaccattggcttgtcagtagccaagcatgtcaaggaagtttatggagttgaggtcatcccagaagcagtggagaatagccagaagaatgctagtctaaatggcattaccaatgcccactatgtctgcgatacagcagaaaatgctatgaagaattggctcaaggaaggcatccaaccaactgctattctggtcgacccaccacgcaagggcttaaccgaaagctttatcaaagcaagcgcccaaacaggagctgatcgcatcgcctatatctcctgtaacgtcgccaccatggcgcgtgatatcaaactctatcaagagttgggctacgaattaaagaaagtccagccggtggatttgtttccacaaacgcatcacgttgagtgtgtaagtttgttagtgaaacgtagttaatcctcaaaaggtttcccaaaccttttgagtccacagacgcatcacgtggagtgtgttgctctgctcgtaaaaacctagaaacctttgaacgcaagggagtttgaaaagccttgattgcaaggctttttgtattggcgtggggaagtatcagagtgagaaaatttttggaatgaatagaagtgatagctagaaattatcagtttctatttccatttaccctgtgggtacgtgtttgtttccattgacaaggagtttatgggaatagaaacgtccccaccttacatatctccagaatggacgattgaaattgagacaatttaatagagataagctcttgttatgtttcttttaagtcaataaactaacaatactcaaagtatgctcaaaaatatgatataatctagaacataaggcaatactgttttaaagtattttctcttaaccatgtctcgttagacaaatctgattcgtctggttttctaatagattttagtgctgacttggttttatagccattatgctctccattattttagtgtagaacactttggttattagttttttgttacattgtaagcaaatcaatagagatagaaaaagggattatatgtttagttatgaggttgtagcaagttttaacgacttagaaaatgctatttatacaactattttagaaaatgaaaatatatcctctatgacaatcaaggaattggcccaacttgcacatgtatcagttggaaccgtacaacgattttgcaagcatctaggatttgatggatatagccattttaagattgcttataaagaatatttaaaaaatgagcaaattattttaaacaatcaagacaataattctttgaagctattcattgattatactgagcaagatacttttttgcagctgattatggaggctgtggcaatcttaaagaacgttgaacagattgtttttgtcggaattggttcctctggaactttaggtcgatatggagcgcgctatttttcaaatattggcaaatttagtatgtgtattgaagatccttggcaaccagtgctacaaaacagtatggaaaaaacttgtgtcattgccttatccgaatctggtgagacttctcaaacattgaaaattgtacaaaaattaaaggaaaaaggttgtccagttattgccatcacaaatacattggaatcaacattgtcaaggctatctgattgctccataacctatcatgttcctcaattatttttaaatgggtttaatattacgacgcaggtacctgttattctcattattgaaatgttaatgaaacaactatatactacaaaagcataagggtgtctatgaatttatttgattatcataaagcaaaagggctaaataatagtgaattaagcgtgtataattttatattgcaacatagagataaagttgctacgatgactatcagagagctatcgacatctataaatctatcgacaacaaccatcattcgttttgcgaaaaagatgggatttgatagctacaatgatttaaaatatgccttgtcaaggtcggaagataaggaaaataaacatcgtcactactttcctattgatattccagcaatacaatttttacagactagtgtccaagatgaagctttaaaaaaacaactatcagagatagcagacttgatcgttcaagccaaacaagttatctttttaggggtgggtactagtctaagtttggcagaatatggctcatatcttttttctggaatcggtattcttagctttgctattactaacccattttattctctgaaattgcatcattctaatttggaggatgttttggttattgctctaagtgtcagcggtgagacagaagaagttctaactctggtacagggattcaaagaaagaaatgctaagattgttagtctgacaaatacagatatttccactttatcacagctatcggatataaatttatcctactttatgccagttgcctacgcagattcctcgctacgttccactaatttgaccactcagattccagttgtctattttttagaatccttacgttaccaagtttatttaaaaaaataggagtgaaaactcttgttttttttatgtaacaaatattgttcgactgtacatatattttctatctcaatatctattgtcagcaggtacagtatgttataaaatagacttgttcatagcgctagtacaaaatacagaaaggataggtaaaatggcaaaaataccagaaggctttttatggggtggggcagttgctgctcaccaaattgaaggagggtatgataaaggtggaaaaggcatttcgatagccgatgtgatgacggttggaagtgctagccactctcgacagattactgatggcgtcttacctgacgaatattatccgaatcatgatgcaatagatttttacagaacctataaggacgatatacaattattcgctgagatgggatttaagtgttttcgaacttcgattgcctggactcgtatcttcccaaatggagatgaagaagaacctaacgaagaagggttgaaattttatgatgatttatttgatcagctgctagctcatcaaattgaaccggtcatcacactcagtcactttgaaatgccctatcatctagttactaagtatggtgcttggcgtaatcgcaagttgattgatttctttgttcgttttgcggaagtcgtcatggaacgatataaggacaaagttaagtattggatgacctttaacgagatcaataatcaaggtgcaattaatgttccttggtgctcatggactaattctggtgtcatttatcaagaagatgaaaatccagttgaggtactacagcaggttatccattatcagtcagtggcttctgcaaaagttgttcaattgggtcggaaaatcaataaaaatttcaaaattggttgtatgctggcaatggtaccattttacccgaatacatgtgatacaaaagatatacttgctagccagaaggcaatggagcatcgtttatttcactatggagatcttcatgtttttggagagcgtccttactatatcgaggccttttgtcgaaaaaataatatcaaactggatattttaccagaagatctagaaactctaaaagaaggttgtgtagattatattggcttgagttactatatgagtgatacagtgactgctacagcatctgaggaaacagaagagcttttcaaagatgtttatactaagaaaaatccctatattgaatcaagcgattggggttggcagattgaccctgagggattacgctatagcttaaatcttttatacgatcgctatcactgtccgctttttatagttgaaaatggattcggtgcttatgataaggtagagcctgatggaatccatgattcttaccgcattgattacctcaaacaacacattgaacaaatgatgttagcgattgaagaagatggcgtaaatgtcattggttataccccttggggctgtatcgatattgttagtgctggtacaggtgaaatggagaagcgttatggctttatctatgtcgataagaataataatggcgaaggaactttgcaacgaatgaagaaagattcctttacatggtatcaaaaagtgattacatcaaatggaaacgaattataaggagtaattaaaatgaatattggattgttttgtgcagcaggtatgtcaacaagtattttggttgagcgtatgaaagaagcggctcagaaaaaagggaaagatgcaacaattgcagcttattccatcagtgaattggaacaaagagttggagatattgatgtggctctattaggcccacaggttggtttccaacttgaaaaagcaaaagaaatttgtgcttctcacaatgttcctgtagaagtgattgcaatggctgattatggcactgtaaacggtatggcagttcttaaacaagcttacatgatgaaaaaataaggagaagatgatgaaggataaactaattaaaaagtttgttgatcggatgatggcctttgtcaataccaaaggtgtaacagcgataaaagatggtattgttttctctatgccattgttgattgttggctccatctttcttatcttggccaattttccagttccagctctagcaacgatgttagaaactagtggtattacccctgttctcaatcaagcaattggtgcgacctttaatatcagtgcgattgtaacagtcattgggattgcgtatacctatgctaagctagaaaaacaggagccgcttggggcaggtgtcattgccttagcagttttcttgctaatccagccctccagtttgatttctaaaaatggggatgtagttggtaacattattctgaaggattggacttccgggaaagggatgattggtgccattatcgttggtttgattgtaggagcaagctattcttggtttttgaagaaaaatatcaaaatcaaaatgccagatggcgtaccaactggtgtagccaacgcattttcagccttgattcctgctactgttatcatcacagcggcaacgatctttgtcggacttgttgaacaattgtttaaggtcacaacgattgaagtgatttataatcttattcaaacaccaatgcaaggcttgactgactcattgtttggtgcggtgcttatgtgtttccttgtaccattcttatggatgtttggggtgcacggctcaactgtagttggtggcatcatgagtggcttgctacaggcgaatgctttggaaaaccaagccattttagataagggccttgaattaaatctagccaatggtggtcatattgtgacgattcaattttttgatcaatttatcaatgttacaggtgccgggattacgattggtttggtagtttacatggttgcatttgcaaaatcaaaacaactaaaaattcttggacgtcttgaaatggttccagccatctttaatatcaatgagccggtgctctttggtttgccgattgtaatgaatccagttttagcaattccctttatattaacgcctattttatcttgtatcatccagtattcagcgatttattttggactgacacctatgtatggtgccgttcaagttccgtggacttgtcctccaattatttcaggatttatcatcggtggttggaaaacagccttgttgcaaacacttattttggttatgtctttctttgtttattatccgtttattaaacagatggataaacaagctttacaagctgaaatacaagaaacaagcgatttagaagacgaagattggtaagagaggcattaaaatggacgaaaaagtactcgaagtgtgttttcaaattatcacctatgtaggaacagcaaaatctatgtacatcgatgctattcaattggctaagcagggtgaatttgagcaggctaaagatagaattaaacaaggcgaagaagcatttgtacagggacacaatgctcaccactcacttttgacaaaagaaatgaatggggaattaaaccaaacaggtctaattctgatgcacgctgaggatcagttattgagtgcagaaggttttcgaacgattgctgaggaatttatagcagtctataaacgctttgaggaaggtaaatagagcaagttatgaaagtaaaaattaagcaatgttaattacctattcagacagtcttggaaaaaatctgaaagacttgaagcaggtcttagaaggccctttgaaagatgtggtcggtggtgtccacattcttcccttctttccatcgtcaggcgaccgcgggtttgcacccgtggactataccaaggttgatgagggttttggagattggagcgatattgaggcactcagtcaagactactatctcatgtttgatttcatgattaaccatatctcagccaagtcgccttatttccttgatttcctagaaaagaaagatgatccgcccatgcgacaaggtgaaaccgaaggtcgagaaggtatcatggggtataggtctcatagaatgaggagggaaacagacgaaacgatacggtaacagagaactgcatagtgtggtgatgccttttaccgactgatataggattgtagagatggtaaactggataggattttggtcaagttgagtagttattttgacaggaatatcatgtgccaatttctcgacaacatcacaatctcaggaagtgggcagattcctgtaactttccttgaaggaagagaagttgacttgtaggaaactgcaatcgaaaggttgcagttttttgtgttgtttcgtggtataatatgctaaaacgataaacggtaagattggttactagctgtaggagttatattatgggtaagtggacttgtcaatgcggatatccaatgaatgaccatgctgctccagacccgaatgctttttcggtattctcggatgagttatgggaagagataacggataccgcagatgaaaataataagattgattattatgatattactgatgcttcgtactatgcttggcaatgtccaaattgtcatagcttgatggtattcggtgaggatgagaatccaaatcgttatactttctataagtggatagatttagatagtaaagagaaggagctatctgatcaagaaactgattcaaattcatcagatatagtttacagagttgcatcagtcactttttcagagtttggtgaggaatacatctatatttgtgaggatgaatcaatcagggaagaccattttgtggttgtacctgttggaatcaacgacgttgaaaagattgctcatgttgtgaagatatatcaggcttcgcaaaaagacatctcatatccaattgacaagttaaagcgtgtgattaagcgttactctgattttgataaagggaaagcaagagagattgcagctgaattattaaggtcaggtcgatgtttgcaaataaatgatttttctaaatcagtagcaacagacgaatattttgatattttgcacaataaacttggatactggtggttggaactgaatggcgttcccattccaatgaaggttatcctattgaataccaattatgaaaagtatcacgttgactgcgctatacatatcaaaccttacaatatgcactatagtactttccaatcgttaaagttatgtaccgactttgagattgacgcttcccgctgggttgatgtcatttcttatgaatatgtttggggaaattactgggaacttgatggtatccagtttgggataacctgtcaggaatcatcagaggaggatgaagtgacacttggcaaatacagtcgtgtcccatattataaggactggcatccagattggagctatagctacggttttaatgtagcttggaaaccacatgaatctgatgaagacttatcggtaggtttttacatttcttaaagtgataaattcgttcaatcatataataacaaagccatactagtcacttttcgttcgataatatagatgtttgctagcatcacatgttgaggcagtatcactgcttgttcaaaatgatttaatatggatgtatctagtgaaaatcccacagtaaggagtttaaacatgaaattccatgaatttggtgataagaatttgcctcctatcttgctgatacatggcggtggcagttcttggtggaattatcttcgccaagcacggatcttatcagaagaataccgtgttattttacctactttgaatggccacggcgaagaatatcaacttgattatgtttctacggaagattctgctttggagatcctagactatatcaaagaacactgtggcgggaagttgtttgcgattggtggtgtttcgcttggtggtcaaattgccatggagcttttgtccttagacagcgagatagctgagaaggccatcatagatggaagcctctgtattcctcaaccaaggttagctaaaatcagcatctttctagtagctctatttggtaaactgatgttcagtaaattctcttgcaaacttcaattaagcatgatgaacaaactctatcctaaactggcttatccagaggaaataaaagcttattatttagaggatctgccaaggacacctatcaaaacattggtgaccatttacaaaacttatatggggcgttacaagctcaaggatacgatttctgctagcaaggcccaggttctgtatatctatggtgaaaaagaattaaactgtgtgaaagcatcggcgaaattatttcagcagctacatcccaacactatcctgtatgaagcaaaggggtataaccatggctatctatcagcttacctgcctcaagagtggattgatttggtggtaccatttttggagaataacgattgattatactttattaatttagaaagcagagtttcatggaagtcaaaaaatatagtccgctcaattcattaaaaaagatagcagataacctctggattgtagatggggaagaagtactgatgaatttcaaactcttcaaagtgcctttttcaactagaatgacagttatccgtctgcagaatggtggtctttgggtgcattcgccgattaagcctagtgataatttactttttgaaatcaagcaattaggtgaggtaaaacaccttattgcacccaatgtcttacattatagttatataaatgagtggcacgaactatttccggaagcagaagtatggctagctagtggtgttcaaaagcgtgccagaaaatcgggaatgaatttatattatggtcatgaactagagaaagccaattggaacgaggaaatttgttttacaacatttgagggaagtttttacgtgaaagaggttgtttttttccatactgaaagttcaactctaattttaacggatcttattgaaaacatagaaacagaaaatttatcgatttttgaaaagctactgttaaaaataggtgataatcactatccaaatggtaaaacaccaagagatttaagaatgacctttttatttggtaaaaaacaagcattgaagagttatcataaaataaagaaatgggaacctaagaatattattatttctcatggaccgtgtatcattggacaaacaaaagagatgttaaaccaagcgttcttttggctagagaaataggaatttactataaagaaattaataaaatatatctaatataattgactaaaattacttggagttgttaaattaagatgtggaatctacttaaattgttgattctaagaggtatcagttgacacgagagaaagaatatagattaactaacggtatctcttaattagatttagtgaaagaagaatccatttttcacttgaatcccttctctttcgtatggtagaatgtatatacaaattgtatgtacaaaggagaggtagaaatggcaaacacgaaagcagtgaattttcgagcagatgagatgttttaccagaaaacaaaagaggtacttgctgatgaaaaaatttctgtgtcagatgtcctaaatgcagcacttcgaaaaattgctaacgggactgtggatccaagagaatttgtttcaagtgatttgcagaacacgcagtatcaagtggcctttgaggatttgaagaaggagattttagttgggcaccaggaaattgctcaagggaaagtcacttctgtagccgatgtgagaaaggaatttggtcttgactaagttgaaacgctatcaggtctttcttgcagatcaggctaagcaggacttgcgtggcattcacgactatattcttgtgaatttttatagccagcaagctgcagatggcaaagttgatttgctattaagtgctcttgagaccctagaactgtttccagaagcctgtcctctggtatcaagccggggctatggtgagatgacgaatgatggaaaaccctatcgttatatgccaatagagaactatctcgcattttattatattgagaagcatacagtgtatgttgctcgtatactcagtgcaaagcaggattgggtcaagattttttataagtaggatgaggaccccatgttaaaatcgaataagctgattatttttttagtttccctaccttttctgatggtcattattttctattctcttagtgagcatcctggatacagtgatgatgggaatttcgttagaaatcatgaggctgctattaagagtgagatcatcgcaaacctagcccgggaaaagcaggacatagaatctgttaccttattgccaaatactgctaggggcgagtatgataatggtggtgatgtgagtggacattaccatatctattttacagcctacgtcaatcataatcgcgagcgaacgataagcgtagaactattcttcccagatgccagcatccccccttttaccttgtttcaccctaacccttataaaagcaagagccaaaagatggccaattggttgatggggaatattgaagtatcaaaggaagcgtctaaatagaaataagaacaagtcatgatgaatagaatagtagatgatcagatagtgcttattccttattataggaatgatgagatctcccttctttggtatcaagatagtgaggtttgcaaacaagttgataatactgaacagatttacgatctaataaaacttcataaaatgtatgattacctaacttcacacggatcttgctattatatccaatatgagggtgtgttagttggagatgtgacacttcaagataactcagaactttctatagtgatcagcaaagagtatcaaaatttacagatcggaagacgatgtatttctaaaatgatacagctggccaaagaaaaagagatggttaaggtaactgctcaaatttatccttttaatacccaaagtcaaagaatgtttttggctttgggatttcagaaagtagatgaaaagttgtatgaatatacgttgatatagaacagttgtatatctccatatatattaagactgtaatctactgtttataaaacaatgttcatgaaaaatagagttaaagggtacctactgatacatggacaagaggttttttcagaaatctaaaaatgaagagaacaccaacagatgattttttgttggtgttctcttcatttgattttacgatctatctcgcttttgctttaaagtaaaagctggcatggaattattcaggcatctagttagatttttgtttattcaacaggaggatagatgatattattgcaatgcaagatacaagaatcagataccaaagattttcaagaccaaaaccatgatctagcatcaagcggtatccccaagaagcggggaaaagacgcccgattgcttgaagaaaatcaggcagtaaggtgatgggaaacatgattcctgagagcataattgagggtaaaaatacaagttgcgctatcatggtcagctttgcttgattttttacagtaaggcccagtatacttccgatactcaacgatacaaaaatgtagatggcaagcgcgagaaagaataagggaaattgacttggtagacttgctttaaataaaattggagcaagtagtaggatcactatgcaagtcattatcaaatgaacaaaggcagagagaactatggtcaccaatcctaaatgaataggcacaccatttgctttataaatcttttttatgtcgcttccgtatgtttcaatcaaggaaggcggtaaaccgagaaaggctcccattgaaacactcatgacaatcattgactgtataagtgtgctacccatttcaggcataacggaagtaaaaataccacccatgagaagaaagaaaataatcggtacaatatagtaagtaaccaagagagacttacttcgtatgtccaatttccactgtaatgttaggctatataaaaaaccattcattccaaacccctccttgccatttcaatgaaatgctgctccagtgtgccacgatcaaccttgatatccaatatctggatatttttctgtttgcattcttccaataatgaaattaagctatcctcgatcgtatctgtttcaaaagattcctctccgtcccgggtctttaaatggatgaaatattttcttcccaacctgtctgtcagttctgaaggagtaccacaaaagacaatcattccactattcaaaatggcaatgcggtcacatagggtttcaacttcggccatatcgtggcttgccaagacgattgtctttccctgcgatttgagcattcggatttgttcatggagagatagtcgtccttcaacatcaagtcccgctgtcggttcatcgagaaaaataatatctggattactgataagtgcaagagcaagatgtaatcttcttttttgcccagtggataattctatgtattgcgactcttcaatttcttttatgccaagggcctttagcataagatcatcaatgtgtgtatgattccattttgcaaagagttttatggcttccatcggtttgatgtgagcgggtagagaggaggactgcagttgaattccggttttcccgtttacaattatagtgccttcatcatattttctcagaccttcgatacattcaagcgtggttgttttaccagctccgttcactccgagcagagcaaagatttctccttgtttgatttgaaaatcgagacctctaagaaccatattgctaccataacttttctttaatccagaaacctctattgcgtctttcatggttctacctcctcaaggggattggttccaagtcttgaaaaatagacttgtaaagcaggtcctaaataatcattgacgattttttgtttttcttcccaagcgtttgtagcgatgccaatattcccaacctccatcaacttaggaagcatgctcatatcaccatttgtaaactccataatcaagctccagtattcttgcacaacctgctggctttgttcgctttcaactggcacgttttctttttgaagctccacgatttgatcacttaggcggttcaacctatccataaagtcttgtccgcttttcttgtcaaatcgactgcgtatctggtcgagcgtatcatcatcaaagcgcttaatgagagagtaggagtcattcttcatctgtagattgacaataatatctgcatatttcttaaaattgactgtttgtatttgtaaaacttctacctttaactgctctattgcgaccaaagaatccttaagttgttctatatttttacgaagaacatctgcctgctccgtaagagctttagcaacatcatcaggtgtttttaaagagatcaaacggctctttatatccttgagagaaaagcccagtgattttaaagatagaatctgatggagtagcactatatctttatcggtataaagcctgcgacctccctcactttctgccgatggggaaagtagcccctctttatcgtaatattgtagagtacggatggtaacgcccattttcttagcaagttccccaactgtcataaatccttccggaattgctctatatttagtcatcattacccacctcctcatacctattatacatcgttacgtaacgtcatgaacaagattatttttaaaaaatttcctttacaaaaactttttcattttcgagaaaagaaagagaggtcatagataaaagaagaatgtgaaaaactgcgtcttagggttaaaaaacaattatgaatgagagaatcccaaaacaaatgcttcttgaggatgatgacaagaaacatatgtttaatattaaggagtatataatgcagagaaattggacgattgtgatgacaagattagattatttgatattatagctacaaagaagtgtatataggtaatataaaaaaccaggtgaattaatagttgatggagacaataaagaagaatgaatgcaaggaatatgttcatgatagtattctgatactggagttattgtcagaaaatctatgatgtgtaactatcttgagtattttaacggtaagttgataggtgacatttataaataattaactgttttataagagaacaccgacatcggagaaatcgcttccagattacgaattgttttatctgtatgaaagtttaaagaccatgatacatgtatttaattgcttcaatgatagggatatcattcaagaacttataattggtatatatgctgaatttcggaaaagaaacctaggaaagcctgattagaaactctgtcctcattatatagagataaatagagctataagaaaaaaagaaattgtttcatagtattattctatatccaatcctttttgatttatattataaatatttattagtactacatgtaatttgtttaaatttgatcttacgggtaggtaagtaaaatacggttaaaatacttgaaataaatgaatttcaatattcatttgaataggatgtacagagtcatttcgctttgtgcagaaactggatttgatcatctttatgtgttataattttcagtagaatttgtaaattatcttttaaaaaactcaaaaggtcaataatactatggcaattaaatttatttcggtaaaatgtccgggttgtggagcatcattagatgttgaggagggaagaacacagttattctgttcctactgtggtaataaggtgactatccaaaatgataacgagtatatttatcgttacattgatgaagcaagtattaaggaaacagagattaggtcaatgttacgaattaaagaactcgaactggaagaaaaggaaaaagaaataagccgtaagggaagatactttgcctttgggcttgctggtggactgctagtgattggcgtggtgtcagagttttttgataatgagagtctttttggaatgtttgtaattgttgtcgctatgtggatagctttatttgcagcaatgtcaggtgatagtaaaaataattaaacgaaaataaaaatggtcaatcttaatgtgctcacttctttgaaaatatgaagtattatcaaggaaaaacttcaatactattgaactgccgtggttgtgaatattacggcagtaatatcatcggatttaattctgctttccacaaaaaaagttaggttgaaactgcttcaattaatgcttatagtgattttgatgaagatgatacttttttaatttttttcatgtttctattatgtgtcatttttttagaaaaagtgggaggattatgaagtgttgaaactgtggaatcgaccttgcaaagggtgttatattttgcagagaatgcggagcaaaagttacaatggataaaagatactgccgtgaatgtggttcagcgttgacagaaggagtaaaattttcttcttactgcggttcgagcgttaaatttcaaattctaaacaaagaagaaaagtctggaaaggcaagtgactataagccactcaccctcattactggttagactacagagtgactccggtttatgcgggggatgaattgattcctcggcaggtgaccttgcaatatgtgggaattgatcgagatggcaaccttctaccaatcaatttaagcagccccaaagagtcagtagatgcttatgggatcaccaccgttaccttggataattattccaagaatgcgaccattgactatctgaaggggaccgcgactccatccttagtgccgacggaaccaagtagtcaaccacaaccagccagtccttctgtagagacgaaaccaagtcaagtaccacaaccgagtcagccagcagtgcctgcacagccagttcaacctgtagagccttcacagccaactcgtcaactggcaccagtggtttatgtggctagaaatggaagtgccgatgtttattggtattctttggacagtatgcctcgcaataccaatttttctaaggtagttcagatgtcagaagagcaggcactaagtcttggaaagcggcatacaagtaaggaatgaggatcagtcatttagataatgagaaagcccaattgctgggctttttgagtggcattacaatcttaaaaagttagtagtctaaaattatctcacaagatcttgcaaacctttttctaaagttgtatactagagtgagttttgtgtaatcgtttgcataaaacggtaaatgatgaacagagagaaaagtaggagacgagacagatggaattaacagcgatttaccaccggcctgaatcggagtatgcctatctttataaggatggccagctcaacattcgcatccgcaccaagaaagaagatatcaaacggattgtcttgcactatggggatccttttatttttatagaggatctatatgaggcgaccaaggaaatggacaaggtgacgaccgacgacctctttgattattggcaagtgtcggtatctgtccgccatgcacggatccagtacctctttgaattagaggacacagcgggagagaagatcttgtacggagatcgaggtgtggcagcctacaccaaggagaacctggactttgtcatgaacggctttaagcttccttttatccatgagattgatgggtgtgctgttccggattgggtggcgcagacggtttggtatcagatttttcctgagcgctttgccaatgggaatccagctatttcgccaaaaggtgttcgtccttgggatgcctctattgctcctcaagtattggatttctttggtggtgatttgcaagggatcatcgatcatctggactacttgcaggagttagggatcacagggctctatctttgcccgatttttgagtctccaagtaaccacaagtacgataccattgattattttgaaattgatcgacattttggtgataaggagaccttccgccagctagtgaaagaggcccacgcgcgtgggatgaagattatgctggatgccgtcttcaaccatattggttatgattcaccccaatggcaggatgtggtcaaatacggggaggattcgatttacaaggactggttccatatcaaagagttccctgtctcctcagaaaatctgtggaatagtcgcgacttgtcttaccatgcttttgcctttgcgggctttatgcctaagctcaatacggctaatcctgaggtgaaggcctatctcttgaaggtggcgacttactggattgaagagtttgatattgatgcttggcgactggatgtggccaatgaaatcgaccatcaattttggcgggatttccgtaaggcagtcttggccaagaaaccaaacctctatatccttggagaaatctggcattcgtcccaaccttggctcaatggcgatgagttccatgcggtgatgaactatcccctctctgaaagtatcaaggattatttcctgcgggggcataaggaaacgcaacgcttcatttgggagatcaatagccagtccatgtactataggcaacaaatctctgaggtgatgtttaacctcttggactcccatgatacagagcgcattttgacgacggccaaaggcgatcttcagtctgtcaagtctgctctggccttcctctatctgcaacgaggaacgccctgtatttattatggaacggagctagccctcatcggtggtccagacccagattgccgccgtgtcatgccatgggagcgcgtgtcagcggacaatgacatgctcaactttatgaaggaattgatccagctccgaaaagaagtagcaggcatgattcagtatggtaaagtgagtctggaagaagtagagctagatatactggcagtagaatggcggtatgaaggacagctcctcaaagcatattttaaccactccaagaaagacgttgtcttagaaagagaacaagcagatctgatcagccttgggagcatctctgatgatcaattggttatccaaccaaatggatttgttatttatagagaagattaataagaaagaagactggaatttaggtatttcagtctttttttataaatggtttctttattcgtacccttatattataatggagatgagaaaggaggagccggcgatgaagatgttagcaatcaatcctatttcggttaaaaaaagaatgatagaatttctatttgattatcttttcattctaacttatttagtttttctgtttataggttcgatgcttatttacatcattttttttaatggtgtcccagagtttacagaaattcagtcacagtggcttgtatttttaacatctattttgccaatcaccctcctgtttacatatttggattatgcaaaaaatgggagcttggggaagggaaaagcgggacttgagctggtctaccagaaaaaaacagtgcaagctagcttaatcagaaacaccattaaatttttaccttggcaaattggtcatatgggcacgattcatggtttctatagtaattttgacggattatccattagcctctctatttcggcgactctcctcgcagttttgctactggtaatgacgctgtttaggaaagataagaggcatataggtgacctgctagcccatacgcaagtgcaactaaaagaagaatagggtagagattgtttatcctatccttaaagaaaaagacaaacatagttaggaaatatctatatgaatgaaaacgtcgagtttacaaatctttgtatggtaagagatggcgatagagttcttgttattgatcgtaaaaaagaggactggccaggcataacctttcctggaggtcatgtcgaagcgggagaatcatttacggaagcagtaatccgtgaagtgaaggaagaaactggcttaaggattgcttctccccagatttgtggaatgaaagattgggtggaagatggcattcgttatgtagttcacttttataagacagaaaagtttgacggagacttaagatcctctgaagagggggaagtctggtgggaggacctgaaagaattgccaaaactagacctctccttagatatggaggatatgcttcgtattttccttgaagaagacctgtctgaatttttctactaccaagatggagaagactggaagtacgatttaaagtaaaattgaacgctgattctgaaaaaataacctgatccaagtgtaatagagcaaagtcctaaattgaaggtgatgagtaacttggtcaagaaatatgatcggaattgggataataactgtgttagatctcaccatgatagcatgcttagtctattagaaaccgagatagaaaaacacaaataagtgtggcttacccttggtctatttttcaattcgtttaattgtacttttacctacataggtgtataatgtgtccctaggtaaagaaaatagtagaataaggagattcatatggaattaaaagattttacagaaaaagaacaagaacagatcaaccaaggtttgagtacagctgatatttctgataaagaagcagctaagaagttgctcgctcttgtcccgcaggaatggatcaaacgaattcctttctttgtcagagggcatgcgacgaccaagactgttgagcgtgtagccaagcaataccctgaactctatgctgtggcgaaacgtcaaggggatcttcctgaaaaagaaggagaagagctccgcaagattatgacagctatctttgaagaaaagatgaacaaacacaagattaaataatcctttatgatttttatctcacaattgaacgagtgattgcagttgaaagattgcagtcgcttttttatacattgtataatgacttttacattagtaaataaaaatgaagaatatttcatgatataatacgaatgaaagtagttcaagaggaatgaaggattccattggagaaaaacaaataaaggtgttcattatgagaagatttttgacatttatttttacgatggttggaatgatggtagtatttgtagcttttatggtatatagttatgaaagaagttataatgaatggaaaagttcacgttcaggatcaaaagtaacttatcctgtagaaaactacgcttcttcaagtgataggaaaaataaggatgatttagaatcattaatgaaaatgtttaagcaaagactttttcctataaccttactagaaccagtagataaagaggcatatgcaaaagctaaatctttgtcagtgaaatctcctttatcggagcagcaaattaaaatttatcttactaagtatgactcgtatacagaggatacttcccagtccgctgtcaataagcttaatatagactggaaagagcgagctgttttaagagcaaaatcatatcaaaagtttcattattcaaaagaatatttagtttggcaacttgtaaatgatgatttatttactcaaaaagaggctgactatgctgcagaacaagttcatttcgattggaaggagaacgctgtgaaagaagcggaatcttatgcaaacgttagcaaaatttcgaaagaaaagatattagaaatacttgttgaaaatagaaaatttactcaagaggaagcggagtacgcaatagaacatgccaaaatagattgggatgactaaaatataatagtgatatgtttttatctaaatgttcttccattacaaacaaatttgtcaataaaaacatttttaacttttagaactttacagaaaaagaacaagaacaaatcaagcaaggattgagtacagctgagatttctgataaagaagcggcgaagaagttgctcgctttagtcccgcaagaatggatcaaacgtattccattctttgtcagagggcatgcaacgaccaagacagttgagcgtgtagccaagcaatcccctgaactctatgccgtggctaaacgtcaaggggaccttcctgaaaaagaaggagaagagctccgcaagattatgacagccatctttgaagaaaagatgaacaaacacaagattaaataatcctttattattttttatctcacattgaacgagtgattgcagttgaaaaattgcggtcgcttttttgtttactagtatgaagacttttacactagtaaataaaaatgaacaatatttcatggtataatactaatgaatgtagttcaagaggatgaaagattccattggaaaaaaacaagtaaaggtagtcattatgaaaaaatttttgatatttatttttacaatttttggattatttgcaggaatgctagctctgatggcaattgagtatcaaataagttataataaatggaaaaattcatattcaggatcattagtaactgattctgaagaaaaatactctacttcaagtgatggaaataagaatgattttgaatcatcaaaacaagaatacgcttcttcaagttctagtacgcagaattatgattataaaaaatatgcttcttcaagtgatggaaataaggacgatttagaattattatttaatttgcttgtgaaaaagctttttcatccagctttagtagaaaaagaatttagaagggcatatgcaacagctaagcaactgtcaaaggattctcctatttcgaagcaggctatcaaaaataaaataaagatttataattattcagacggagccaaccagtatgctgtatataagcttaatatagactggaaagagcaggctgttttagcagcaaaatcacttcaaaggtatcgttattcaaaagaaaaattagtttggcaacttataaatgttgaactatttacccaagaagaggctgactatgctgcagaacaagttcatttcgattggagggagaacgctgtgaaagaagcggaatcttatgcaaatggtagcaaaatttcgaaagaaaagatattagaaatacttgttgaaaatagaaaatttactcaagaagaagctgagtacgcaatagaacatgctcaagtagattggttgaattaaacaataattttaattttgatctttgtaacatattgaagagctggacagtttgccagctcttttttactacttataaaattttcttatttcgtaaaaaatagttggagcaaagccagttttaaactataatataggaaaaggattatcgatatgaaaaatttatagaacaaacattttaatcaatagagaaggaaccagtttatgaaactatctaaaaaaatcatgctccttactagctgtgctttggcgatctttgctttagcggcttgtgggaccaaccaaaagcaatccaaggaaaagaaggaaacttccactgtgcagaaatctagttcagacaaggagcactacaagggaacatacagcaacctcaatagcaaggctagtgtcgaagaagtgcgcactctcttgtctgcttatttggatcaggagagtgtagataaatttttgggtctagtaacggactatgatagcattgtcggctcggtcggcttgacgggtgacttcagcactttcaagaaaacaaactacaatgttgagaagatcagtgacttgtggaccaagcagaagggcgatttcgtcgggaccaactgccggatcaatagttatactcttctgaagaatcgcatcgagattcctaagatgaaagcgaatagtgaactcttgttcgtggacaatgatgccattgacaaaggcaaggtcttcgatgaggcagacaaggaagcctttaacattctgtattcacgggttccgacagaagctacaacggatgtcaaggtccatgctaagaagatggaagagtatttttctcacttcaagttcaatgaaaatgcgcgcatgctttctgttattgttcatgataacctagatggcaataccctttttgtcggtcacgtcggtgtcttggttcctgctaaggacggctatctctttgtcgaaaagctgacctttgaagagccctatcaagccattaagtttgcgactaaggaagatgtctacaaatacttggagaccaagtaccaagactacacaggcgaaggtctggctaagccctttatcatggataatgaaaaatgggttgagatgaagtagaggatgaaagacagcgtgttagaatttagaaagataatggagtatgctccgattctatatgtgctcattttcttgctctttttcagtcttctccttttcctgagaagaagggcaattgtgagacgtagtggaggtcccttctttgctcctttccatattagctatggaatcttctatatccatgtcgctctgtgtttcagtcgtcgcaggatcccgctgaaagagatcaagcaaatcacgtatgcaatttttcgtggacgatctggtggcggggctcgctatgctttctatatcgagcttagaaacggaaagactattcccttcttttttggaaaaagtaagcggaatgaagctctggttgagaagctcaaacgaaatgctggcaggtatgggtttaaggtagatagcactggtaattattgaaagaaaaaggaatcacgaatgaatagaaagcaagccctatctatgtatttgttagggacctttggtcaagtattaggagtcagccttctggtttgttttttaagagcaggaggagtcaaggtcgattttacatcatcatttgggatcatcgctattattgtaggtggcttatcatctgttttttgggggagtcttgcaagcattagttactatcaatctagtttcaaacaagttttaaaagatttttttcaagtcaaagacagtttggcaaattattgcttggtgctcgttttcttgttgcttgactttttcccatttatcttaggtggtaagatcaccactcaatcgttggtcttgccagtagtgctctttttcaaggctcttctttttggtggagttgaagaaattggctggcgttatttctttcaaccaactttgcaggaaaaaataccttatttttcagctactttgatcacctttttagcttggtctagttggcatctactatatttttatatcgacggttctttagctgtcattcaattgtttccgtttctagtaggtctgctaactaactgctttatcttatcggccttgtatcataaaacgcaaaatttatggctctgtgtcatgactcatgcctgtatcaattccttgtctcagatgatagtgaatgaagatgtatggctatctatagttagtaaatttcttattattagtttagcaatcatgattgcaagaaagaagtatgtaactgtaaaggaagaaaaatgagcaaatttatttcaaaacaatcagtcgctagttggtatgcaatgactgccctcttagctacctttctagtagggcaagtgatcctttggtttttcccagatggaagtagtatggggacctcactactgtttatcctaatgaacttgattcccctgattgtggcggctgtcttttctctggtgttgagtgaagtcaactccttgggtgaatttttcaaaaaggtctttcttcaaaaagaaagttccctatcttggatcctagctttcttcatccccgtcatctattatgggatttccatcctgcttatgaacgttcgctttactgggaactccctcttggccttcttcatttatttcccctggaccttattatatggaggcctagaagaagtcggttggcgttggtttttacaagatcatctttcctatagtaagcactttatacctaaaatgatgcttctttccattgtctggttcctctggcatattcctatctatcaactcccttggattacagcaggttcgtccaactatcttatcttttacctgatgattttagggaatgccttcctatttggagcgctcaaggagtactcgaaaggagctgttccttgtatccttgctcatatgctaattgatagtctggctgtcctcatgctggttcagagctcgcttcctcagattatccttctagttattttcgaaattctagtagcctcttggctggtggctgcacgaaaatcagagaaatagagttgaatctctttcggtgggagtctgtcatctttagcctttaggacttcaatgtagagtccataaaatgctataatcagtttaacgaagaacctagagataggatcaaagtatcaacacagtgtcattcttatctataatgagagagggggaaaaacatgcaaaagacctttcagttgttgcgaagaggagatatagagggagtccgtcagatattggataaaaagcctgaagaagtcaatgctgtttcgggtgacaaacctaaaagagatcaggggcagtcgctccttcaagtcgctatcaaatcgggacatttagatattgcagacttactcattgatagaggagcagatcttaactttattgaagagccgacagagctgaatccattttgtcaaccagtcctccaaacagcgggtggacgagctgtatttgactgtaggcgcatgatcaaacgctggaatggccaatatgagatgtattcgtctaaggaaaaggctgaccggtctttcaaggtttttgagaaaatgttggaacttggggccgatatctctcagaaggacagccatggtgggactttgttgcaaactattttaattgaaaccaaggaagttctgccatcttattattggaaaacaaaagaaacaagcgataatgtcctcataacggatgaattacgtcatgatttaaatcgtatttatgatctattaattcgttacggtgtgactgcggacgaaatagcggtctatcagaacattcctcttaaagaactttaccaggacagccctaccatggaattcttaaatcgcttagatcagagcagatctttataagcgtttgaaatatgactttgaagagtcttagggctctttttgtttttcctgacagagctggaagtagtaggaaaatgttaaaccataatttattaaataaatggatacaaatcctagatgaaatagagtatactagttgatgaaagaacaagatttttaagtatcgaattcaggagggcggtttatgtctcaagaaacttacatcatggcgattgaccagggaaccactagttcgcgggctatcatttttaataaaaaaggcgagcaagttagctctagtcaaaaggaattcactcagatttttcctcaggctggttgggtggagcacaatgccaatgaaatttggaactcggtgcagtcggtgatcgctgaggtctttatcgaaagtggcatcaagcccaatcaaatcgaagcaattggcattaccaatcaacgggaaacgacagttgtttgggataagaacacggggcttcctatttacaatgccattgtctggcaatctcgtcaaactgctccactggctgaagaacttaaaaaccaaggctatgtagaaaccttccaccaaaagacaggtctagtcattgatgcctacttttcagcaactaaagttcgttggatcttggaccatgtagaaggggcgcaagagcgtgcggagaagggcgaattgctctttggaaccattgatacttggctggtctggaagctgacggatggagctgcccacgtgacagactattccaatgctgcccgtaccatgctttacaatatcaaggaactgaaatgggacgatgagattttggaaatcctcaatattcctaaagccatgcttcctgaagtgcgttcaaactctgagatctatggcaatacagctcctttccatttctacggtggacaagtgccgattgcagggatggcaggagaccagcaggctgctctctttggccaattggcctttgaacctggtatggtcaaaaatacctatggaactggatctttcatcattatgaatacgggtgaagagatgcagttatcagagaataacttgctgacgacgattggatatgggattaatggcaaggtctactatgcccttgaaggatcgatctttatcgctggaagtgccattcagtggctccgcgatggcctgcgtatgatagacaattcacctgaatccgaggcctatgctctgaagtcccagaaccaggatgaaatctatgtggtccctgcctttacgggtcttggagcgccatattggaatcaagaggcgcgtggttctgtctttgggcttaccaggggaacgaccaaggaagactttatcaaggcaactcttcaatccattgcctatcaagtacgcgatatcatcgacaccatgcaggtagatgccaaaactcctatccctgtcctaaaagtagacggaggagcagcaaaaaatgattatttaatgcagtttcaggcagatattcttgggattgcgattgcccgcgcgaaaaacctggaaacaacggctttaggagcagccttcctagcaggtctgaccgtaggctattggaaggacttggaagaattaaaatctcttcatggagcagcccaaatctttgaacccaagatgaatgaagcccgtaaagaggaactgtacaaggggtggaagaaagcagtcaaagccactcaagtatttgcggaatctgatgactaaagggacccatcaaatgaatagtttatgagagagagtgggacagaaatcggtaattcgttagaattcgatttcgtcgtcccacctccgcacagttgagtagggctgtaaaagctgatgaaatcagcgtagtagagcccactcaaccactgcgtcttgcttgacaatccaaaaataattgagaggctaggactttagtcccaacctcatgtagtttttacagaatagaacagttatctgttttggttaaaagccatattctatttcacttatcactaaataaaaatatcatataaatgaactttttttaaaaaataacaggccagagtttgacacttttttcacaaaggagtatactgttagcatagttttgtcggatatttataatagaccccatcaaaactagttgtcaacccttgctgttctgataggaacgtttgctggtatcgttgataccaaggaggaatcatatgtctaaagtagctattgtcacaggtgctggtcaaggaatcggttttgcaatcgcaaaacgtttggtgcaagatggcttcaaggtcggagtattggactacaatgctgaaacagctgaaaaagcagttgctgagttgtccgcagaaaatgcttttgcggtcgttgctgatgtatccaaacaagcagaagtagctgcagctttccaaaaagttgttgaccattttggagatttgaatgttgtcgtgaacaatgcaggtgttgcgccaactacaccacttgatacaattacagaagaacaatttacgcgtacatttgctattaacgttggtggcgtgatttggggtgctcaagctgcacaagctcaattcaaagcgcttggccatggcggaaaaatcatcaatgcaacttcacaagcaggggttgtaggtaaccctaacttgactgtttatggtggtactaaatttgcagttcgtggtatcacacagactttggcgcgtgacttagcggattcaggaatcactgtcaatgcttatgcaccaggtatcgtgaagactccaatgatgtttgacattgctcatgaagttggtaagaacgcaggtaaagatgacgaatggggtatgcaaacattcgctaaagatatcactttgaaacgtctttcagaaccagaagatgtagcagcagcggttagcttccttgctgggccagattcaaactacatcacaggacaaaccattatcgtagatggtggaatgcagttccattaagatgaaaaaagaggttgggatcaacatcctaacctcttattttgtgcgttcacaataaaagaaacggagatcaaaaaaaccactcccgaaagggaagtggttctgtgttggttcttatttgagaccgtattttttgttgaaacgatccacacgtccatctgcttgagtgaacttttgacgtccagtgtagaatgggtgtgagtctgatgaaatttcaacacggatcaatgggtaagtttcaccttcgaattcaactgtttcgctagagtacttagttgaaccgctgaggaacttgtaaccagtagtagtgtccatgaagacaacggggcgatattctggatggatatgttttttcattttgcaatatttcctttctgccatggtctctttccgagccatagattgttactaagctagtttaccaaatttccaggatcttgacaagtattttcactaattttatttaaaataatgatcaaaaaaatcaccctggctaagccaaggtgaatctaatattattattgttcagattgatttggatcttttggtgcttcaactggttgatcagcttgtccttcagtgtgttcgtgtgtttcttttttgatttcatctacagcagtttttacagtagaagttgtcacgcgtccaacagattgggcaaatcctttaccagattcagcaagttcttcgaatgttccttttgtgattttaccacctgacatcgccaagagaccagttacaacaatagcgattgatgcgattaaagcaaggatcaaaccaaagccaattgaaacgccataaccattgaagtcaacagcgtacttgttcacaccgaagacatcgatcaatgttacgatagttgagagagctcctgctacgataacaccaattgcaaaaccttttggtagtgaagattttacatcgttcaagcaagcaaggacaatcgcaacgactgcgaagataataacgaaccatccatctccgcgaaggccattccagctgtatgaaccaaaggcaccagcattcaggcttgcccatggcaagaaagagctaagaatcgctaccgcagcagagataatgataaacaaacgatttttttccataataagtctccttaaaaattttattagctttattttaccataagaaagatcaaatgaaaaccccatgaccaagataaaaaggctgagaaactgttctcagccttcgtttgtgcgtgccacttcttgtagctctttgtagatttggtcgttttcttcgagggagtaggagttggctccactcgctagtggatggccaccaccattatgtcgtttggcaatttcgttgatcacttttcgtttgctacgcatccggacacggaagtgaccgtcggcctgctcaacaaagatagcccaaacagatacggtatcgatgcgtccaggagctccgacaattgcagcggtctctgaatcacgtagatcgaatttcttcaagagctcttgtgttagggtcacacgcgcagcgccatgttcatcgatctcgagatggtcatagacatagccttgaagcttagcggttttgagattgatcgtatccatctgtcgagcaagtgctgtaaaatcaaagggaatgcttcgaagataggcagcaatctcaaaggtccgagtcgaagtagcaggataaaggaagcgacctgtatcgccgacaatcccagcatagagaagacgtgcagcacttacaggaagttcaagatccaattccttagcaaaaagtgcaatcaactcactggtagagctagactcagtatcgacccagagcagatcgccataagcatcgtcatttgggtggtggtcgatcttaatcaggaaatcaccagtcgtatagcgcttgtcatcgatgcggggagtattagccgtatcacagacaatcaccaaagctccagcatagtcctcatcgctgacagtatccatctcagcaagccaagtcaaggtcggttcatcatagccagttgccaagacccgcttttgagggaagtgcgcacgcaggagatcccgcaagcccacctggctaccaatcgcatctggatccggattctgatgacggtggataataatcgtgtcataagcttgaatcttttcaagaatttcattcattacgttcatacattacctcattttctctgtcaattttaacataagaaaggcccatccagcaagcatttatcactaattaggagctatggaagcggttttacattagttcaatattttggtagaatggataaatagatttagtatgggagggactaggatgattgaaattaaaagtaatgctgagacggctcaagagttagcttcttctttaaaaagtagtggggatgcactttcgggagttgcatcggcttcgaaagatgaacaaaccaaactatctggtaatgatgcggcccatcaagccattgatactgctaaaaccaaagcagaagaaattgcagcggcgattgaatcaatcggaaccaacctgcaaagcgtttcaacaggatttacagcagtggacgaagcgactgctgcgagcatgcaataggttgaaagagtaggaagatgaattacgatcaacaactatcggaattgagaagacgagaagactttctttatcaaaaagaaagagatattgtaaaagaaaagagaaatctggaaaatgaaatgaaccgctttgagggctatagctctgatgcgcaccgttatttatggaatgcatttgaatcctatccttcctctagaaatttttttgaccaacttcaggagggggttattcatgaatcgcgaaaaatttcaaatagttatttagaagagctggatgaattagctattcaaaaaagaaaagtcgaagatgatttaaatgatatctatcatgaacggaaaaaattaatgattgaaaaggagtgtgacgatgggaattgaagtttatcgcggtagtttggatagtcaggctactagcacagggacgatggttgagcagcaactgaaagcctatgaagtactagaaacatcattaacccaaatagaaaattcagcctcacgcttgtcaggccaagcttacgactcatttagaacctttgtgacaagtgtagtccagccattgaaagaggccgggatagctttagcggatgcgacacaagaaagtgtgaaaaagctcccaaaatcctaccgctctgaggtggctgatgaggacttacaggaagaaaagttggtttctgatattgaacagtgtgatcggatgattgctatctttcatgcagagattaatgaaatcgcagctagtcaatcgaccagtgctggagattttcaacggttgcagagattacagcgacttcaaggcttaaacgtattagatggtattgtaaaagctgctagaaataaactacaagaaaaattaaacaaactaagagcatttaatgcaacgtcaccaagcatcttctgggaaattgatgttttagcccaagctattcaaatagctgtcaatcaaattaacgtagcgtgggatccaaatactggaatgtattctattccaaaggatttatcctggtctgatctcgtaaatgaaacgattaagaataaagagtttgaaaatgaatatttgccaacgaaaccaaaggatgtatcagcgttcgaatataaccaatttctcacgggtttacgtgaacaatcagtgaatcttaaagaaatagatggctgggataaggatgccatcaaaggttatgtcaaaggcgtttcaaaaagaacagcagatatcaagacaggtagcgagttaaatgcaaggagagatgctttatatgcggaaaccaaggagattggatccgatatttatacagagatgtatgctagtagtaaacttgattcaaaagcgaaagtaaatctggttcttaagcaattgggtgcggaaacggacaaaaagcagtttatgcatttaacaagtcaaactcataagatttcagaaaatctggcaccacatggggatttcaacatgtatttcagacgagatgtggtaaaagccttcggtgataaacatcttaattcattgaaagatgaaaatcttactgctaaagaaattgaagatgaacttaagaaaattagtaaaaaagaaattgcattgcggcagcaagtccatttcttccgctattatctggatcgtcaagcaatttactatattcggagtcactacgaaggcgcaaatgattatgaaaaactattagcatatggtaaagaaaataatattgaatttgattacacaaccggctctaactaccataaccgctttaatccaaaagatggctttaaacgtccctataatatgaaggttcaagtccctcagggcaattcagctaaaggaaaagatttaaacaatgcacggatggtggaatttattgtgaatttggataccggcgagtttgacagtcaatgggatgcctatgataaacacaagctagcaaatggtcgctataactcagatctaagcgcatattctgatgatgaatttagggaaattgccaatacggaatccttcaactatggtccttcaaaaggtcaaaattcagatgttactaagttttacgaaggtaaacatggaatgcttgatgtggatggtactcctgagccagctactcgaactgaagcaaaaagactatttcgctatgaaaatgatttgggtaaaacagatgaaaaaactgctcatgtaggtcaatttgcggatattgtaaaaggaggaggacatgaagactatgaagcatggcaacgtaatacaaaaggaatgtcagaaaaagaaaaaatggaagagtataataaatataaaagttatgctagtggcattaagcctagcgatcgcgggtataataagtatactcgtagccctgagtacatcaaagagcataagtgatactcattcaatattaataaataaacgttatattgagactcaaagtatttcagataatgataaaaaattatcaatcagtgcaggttttgatttaaaagaaaaagattttttttattaccatggagctgcaataaaaaataataaattgtatggtggtagtcaggaatatagtgctgcggagtattataaaagagctttggatattgagctcacttcagcacttttaaatcaccaaattaatattaaagatataaaagattccaactatcaaatcactcgttcaactgattcattcatcaataaaaaattattagaagaaaaacatccgcctgaatttgaaggtagatattctatcaaggatagtcagttttccaaagtccgtatcacctacaacaaagaatttctaccaacaaaaattgagtggtactataagggtgaagaaggactaaaatggtacacttggcgcacctattcgtatcccttcaaaaataagtctgattttgataaaaagctggatgaagaaatcgaaaatattaaagaaattcaagaggaaaatgagggagattaacctagttttgagataaagctgagcttacatatgtctcagctttttgaatagtttaacacttcactttggatgtatattttgctagaatgtgatagatatgatgaaaaaaattaaaaagagacgatttagcctaaaatccattttattgctgactcttctattgcttactatagctagtatttttatagttgtccaaagaggtaagactcaagaagattcaaaatcgatattagagtatcaaaggtttattgtagttgatgattcaacaaacaaagatcaatataatcataactttgagattggaattgatctgaaaaataagaattattataattctactcaagtagcggttaaaaatgggaaaaaatttggagaatatgagtccgtttcttcgtctgatagttataatggtattctctatgaggaagttacctccgcaattctgaatttaaaggttccaaaagaagagatcgagaagtcaaactttatcattgaacgagatccgaaatctctaatcactaagtcactaatgaaagaaaaaataacacctgaatttgagtctagagttttagataaaactgaccaattttccaaagttcggatcacctataatcaagattatttaccgatcaaacttgaatggtattttaaagggaaagatgggttgaagtggtatacctggagccgtttttcatatccatataagactgaatctgaatttaataaaaaactagatgaagaaatccagcgtattaaagatattgaagaggagtacgagttggagaaggaaaacggataataattgaacgattaaagcaattcaagaagaaaacgagggcgattaggttgtatcagtccaatttcttgaaacgtgtcccttctttcaccttatcgggaaaggtttcgtgcaaaatgcttgaaaaagtggtataatacgggaaatagattttgggaggaaattatgactgtagcgaagattgtttttgctagtatgactggaaatacagaagaaattgctgatatcgtagcggacaaattccgtgatcttggtgtcgaagtagatgtggatgagtgtacaactgtggatgcggaggacttccttgatgcggatatcgcagtagtagcgacttatacatacggcgatggagagcttccagatgagatccaagatttctacgaagatttggctggccttgatctcaaaggcaaactttacggtgttgtaggatcaggtgataccttctacgatgaattctgtaaagcagttgatgatttcgaccgttgcttcgctgcgactggtgctgaaaaaggttctgagtgtgtcaaagttgatttgtctgcagaagacgaagacattgaaaaattagaagcctttgcagaagaacttgtagcaaaagcaaattaatgacaaagaggatggatcgatggattacagcctcgatttatatccaaaataaagaggagacacatggatttagatcagattcgtaaggacattgaccagatcgatcaagagcttgtagccttgctggaaagacggatggtctgtgtcggtcagattgtagaatataaggagcagcagggcttgccagtgctcgatcaaggaagggagagagaagtgcttgagaaagtcggctctctcgtgacggatgagcagtatcgtgcgactattcaagctcagtttcaagatatgatgaagcgctcgagagattaccaagaggaggtgagggtgcgtgactagtctatcgatcaagcaaaaagcacaacagtatgtggtcctaacaggtatggctcttttcattggactcttggttggtgccattgacatgatttttggtcaaggtcttcttctgattggagatttccgaagtcagcattggcccttgattctttttctagccatagcgggtcttgtcatcgtttatctttataaacgttttggtggcaaggcttcaaaagggatgggcctcatctttgatgttggacacgcgcgtgaggaaaaaatccccttggtcttggtgcctttgattatgctgacgacctggatgagccatctctttggtggttcggtcggtcgggaaggtgtagcagtccagatcggtgcgaccctttcgcatcgttttgcccgtcatattaagattccagatgcttcgcgtatttttctcatgaccgggatggcagctggttttgcggggctctttcagacgccactcgcagcaaccttctttgcccttgaagtcttgacagttggggagttgcagttgatggctctctatccagcgctcattgcctcaatcgtggctagcttcacctctcatgcccttggcttggagaaatttgctgtgccactaagagaaacgctgagctggacaccagagaccttgattaaagtcgcccttcttggactggcttttggcctcgctgggaaactctttgctgttagcctttcctggttgaagaaaaccgtcgctcaagtcttgcctaatccttatatccggattgcccttataggggctggactcagcttggtcctcttgaccctccagctgaccaaggtcggcacttatagtggacttggaaccaatctgattgatgtagcttttcatcaggggagtgcccatagttatgactggatcttgaagctcctctttaccgtggtgaccatctcagctggataccaagggggagaagtgacaccgctctttgcgatcggagctacgcttggagtctttctcgctcctatgctgggcttaccagtcttagtcgtggccgctattggttatgccagtgtctttggcagtgcgacgacgaccttgctcgcaccgatcttgatcggaggagaagtctttggctatgccaatctgccattctttgtcattgcttgtgccatcgcctattgcctaccaaaagagtggagcatttattccggtcaaaaagttgcgaaaaagtagagaaaagagctttacaaacctgaaattatctgatatgatagtttctgtgcgtaatggaagcacaaaaatacagtttatccgctgagggaggtccctcaagattgacgaagataggagaataaaatgaatccattaatccaaagcttgactgaaggtcaacttcgtactgatatccctgcattccgtcctggtgacactgttcgtgtacacgcgaaagttgtcgaaggatctcgtgaacgtatccagatctttgaaggcgttgttatcgctcgtaaaggtcaaggacacactgaaatgtacactgttcgtaaaatctctaacggtgtcggtgttgaacgtacattcccagtacacactccacgtgtagaaaagattgaagttgtacgttacggtaaagtacgtcgtgcgaaattgtactaccttcgtgcattgcaaggtaaagcagctcgtattaaagaaatccgtcgttaagacgaacaaggaggcgggagtgatctcgcttctttttttatcggtccccttagttcaatggatataacaactccctcctaaggagtagttgctggttcgattccggcaggggacataaatttatgacgaagagggattttctaattgaatagaaattcctctttcgagactttccttaggtgtaattctatttagtttatatatttttagtattctaaaagagataaaggaattaaagcaaataaaaggtaagtaaatagatagacgtaatctaatttgtattgtctttatctggactatacatccgtatcttgaacaggttactaaaaaggtgctaaattatgaaaaaagtcccattgttagtatttaaaaaaagacaaggtgttttatccttgtctttttcgttttacgttttagtactgcttttgtttcaatgtcaataaatgtgttctttttggagtattctatatattcgaggtaacattatcatggtatagatcaggagagaaacacctccaaatatgaatatcagacctccgtttatgtccttttgaaatagataagtaaatacaatggtacctatcggcatgatagacgtatttagtgtgaacagagtactcattactcttcctaaataatttgtttcaatactactttgaagataggtcatgacgacaatatttagaataacaagagtaaatgctataattcccataaataaaccgccaacggaagaaataatcacttgggtgttagtagttgaaaatgtaatacccaaaccaacgatagcgatggttagaagaaaaagtggaatgcgaattctattagaaagaagtgtattattttcttttttgtctggcaatagtgacatagacacactggctaataacattccaactgcagacattgtttctaggatacctactgttgcattatctaataagagttgctctttgactacaaatggcactccaatgctaatggaagtatagaaaaaattcagtacaacactaactagaataatatattttacaatctgattttcttttaaaaattggataatttctttgaacccctgttgatgcttttcattctgtttaatcttagcttcttgctcttcatgttcatagaagaatttcatggtaagtaagacacctaaagaaaggatatttgcaatgatttctataagaataaagcctgagaagcctaaccaattataaagaatgactccaatagctggggaaagcatggttgcgatagcaatggcggtttgtgtaacagaacttaatcgttgaatttttttatcgtttactaactcgtggatagaggctgaataacaagtatcattgatgttgactgtaatagagtggagtacgacaaacgggattacgaggtataatatagtagatgaattcgttaaaaaataaaaagcataaaacagaagaaagattaaaagcctaaagataaaattataaattaagatctttttatgacggtatctgtctactaaattaccgattggaactaagaaaattaaactaactaaaggatagataatcatattgattccaaaactcattgccgattttgtttggtccagtaacattaatcctaaagcaaaattaaaagcttttccacttaaagaactaataaaactactaataaagtctttgatgatttgtctattagacattttatcacttattaaattcttaatattaatcccctccattcgtttcaacattgcttcggttatctaatcctattcaatcaacctgtgttgtaaggtaattggaatattagataaaccataatttttgttaattaagattttatcaattttactaataaaagtataataaaaaatgtaaaaaaaaattgtatttatgtttactaattatatttctctcttgctttgatattatctaaattgataacttcttacgtacctcttctaaaataggatatattttacaagcgttaaaggatttcaaaatgaaacagattgatttattttgctttttataggttttaaattcacaataggtgctagtactatttatcataccacttgacaccgctttcaaacgggagtacaatgatattgaggaaaagatggcttatctcttttatttaggaggtggcagatatgcaaatctattttatttattctattttctttctattatcacttgtagttctagcttatcttattaagttactcattgctcgtttaaaaagaaactaagtaacattttgcccaaatagtagttatttgggctttttgctatactttagcctagtggattaaatttataaagataggatttagaatattcttattgagtgattttattttatgaaggttgtttataggtaagggggaaaatagatggtttctaaaattgatgtggcttgggacttgtttctggaaggaaaaatatcagaagcaaaaaaattggttgaacaagatttttctattgatgcctgtacagattttagccttttaaatctgatgggatatttattgttagcagaaaaagactatgtttcatgtacacatatttttgagaaatacattttattagctcaactaaatgaagataaagaaaatgaacatattggattacatcaattagcgatgatctacagggaacaggggaatttccataaggctttaaaactcattaaagatgaagagaagataattgaagagcattttccaaatgataatctaaagaaagctgtgaataactacgaacaaggctatgtgagatttaaattaaacaaccttgatgaagctcttacattcatgaatctatcactggaacaatctttagaaactgatgatgtgatttctcaagcttgtagctatagagggttaggtgaaatctatttagctttggaagatacggaattatccaatagacatttcaaacgagctatagaacttttcgaaagtgttggagagtttgaagggataaaggaaattgaggaattgattcacgaatgattttacatttagtttttgttattagtttgcctaaataaaaagttttaatatgctataaattatgtatttgattaaggggaataagatgagaggttgtgatagaaatggaatttctatttattttaattatttttataccttatttcttttatttagaatggaaggataagcctaaacaaaaaaatatgtccttttgctatctttataagttttatatgatttacttgtggtttatcctcataatttccataatggctatcggtattttttcccttggagtactagctgttagaggcgaaaaacttacgtctggtttctttgttttatcttttttaggtatagttctatttagtttctatatttttagtattctaaaagagataaaggaattaaagcaaataaaaggtatgtaaatattaactaagagaactagctaactagcttaagtaaaatataacacggccatgattcatgagccgtgtttttgtatgaatgtacaattgaaaaatttttagttttcacttaaataaagtacataattgacaatgattagctcaaaaacatttttgggttactagaaatcgtagaagttccgtgactaattcttgagcctagggcacttttttcacagcggaaagtctctacagaaaataaatgggaaatgttatataaataggagtttatccaccatctaaagtaactcgtgaatgcgaatttttgtaaatttaaagttaacaagtgatggaatatctaaatataatgaattgatttttgaagaaggaaggagtaaaataaagttaatataatgaccgattagagataaataaaacaagacaaaaaaaggcaccgaatcggtgcacactttttcaagtcggatacggacaaagccttattttaacttgctgtgttgtttcgaatggtcacaaaacttattttttgtatgatataatagaatattttaaaaatgaagggattttctatggagagtgatgtgttttttgattattatttaaaatcacttaggttttattttggtgataggtgtaaggatattggatttataaagtttttgaaagatgaaaataatagttttattacaatagaggattatgttttagaatcattagtagttttgacaaatattttgagtaaggagaggattgtgttttcttgtggatttattcatagcaagggggtagttactggagtagaagtatgtatgaatatattagagttagaaaaattaaataatttgtataagatttagttttgaagaatattaaaaaacataagggaaactgtctatgtgggatgtgtggagttgatagtatcaatgtttctagttatagagctttattgtttcgaacagtcccaaaacaagaaaaacaaaaaaatgatggtctaggagctcgatacattgagcttctttttcttgagaaattcaaatcataattttacagacttttaggtcattaattgattctcccctccgctttttctttgactctcctttcttatttttctaaaatagtaggtgtgtgaagggagattgatatgaaaaaaggtttggtaattgtgctttctgctttggtcttggcttcgtgtggtcgtcctcagaggacggtgtcgcctaagagttcggataccaagcagaccagcacttcggaaaagaaacagtctggtatggatttgaaagccatcaaggctaaggactactcgagtatcaaggggacttggatcgatggtcgtggcaatgagctgatctttgatgataagggcttggtcagcgaggatgtcgagcttgatgcatcgagctttaagcagaaggaccagatcgctgagatgacggttagtgccaagtcgggtgttggaggctacggtctcttgctccttccaaaaggtcagaaagcgggcaaagacgatgcttcggataagtccaaggatcggatctgggctggtcagtcaccggcttatggtgatgatgataattactactatcgcaagaaagagcaaccgaaagatcgggagcaagcagatacagacgatagcagtagtacgacaaagaccagtaaggccaagaagtggaatactcgatcggatggtgaggtcaagtcttcgaagaaggcggataagaatgattatccaggctacaccgatgctcaggtcgaagctgcgcgtgtctgggcttatgtgatcaagtctgtaccgacagaattgagtattaatgaaaagagtgctggtacaaaaatttactttggtgggctaggagttgactatcctaaagatgttcgtcagttgtttacaccaatttctgcagaaggccatgtgacttatgcatccaatggtgatggaacagtcacgatctatcctgtaccgagccactggcaacagtctgctgatgaactcaatagtgaagagtttatgacgcaatttacccaagggatcttggaccatgctgaaacggtgacattgccagacggggatccagacatgattcgtcagattcttgcagtactgaagtaagagagattatggtagaataatattagataaaattttttaaactattaaagatctaatgacctattaggttataagattaaaggtttggtatatcttttacaggaagcttatgcaattttggtcaattacaggtcgttttctacttgtaaaaataaaaggagaaaatctatgaaaaaaactatgtttgctacaatgaccattctctcgctatttctgtcatcgtgcgcgcaaaaagaagtgaagaatgaagacaaaaaagagcagtctactgaacagaatgtaaaagattctacaaaggaaagtaaagaatcagtggtcaaagggatgaatcaagcccctacctcattggttggaaatgaaaaacctaatgtagtatttgcttatatgcttcaaaatcaaatcaatggcgaaaatgagatagcgagagtgtattataatgaagagtatctgatccttgtcttctctgtatcagaaaatatgctatctttagcaaatataaatccaaaagattattgtaagacgctttttgatttaaaagaagagatagtaaagcaatacaatgcaactcaaaaaacaccaagcagtataaaacttaaaatatatgataaagatgagaagctcttggcaacggaggaaaatggagctttggtgattaagtaactaaatttagtcaaccatttgtcgccatctacgttttatatttttctcactaatccacatttattgtttttttaagctgatcctgttacaatgatagtactcggaaaagactgggcttccagcctttttcatttcaccatagaaaggtcttttatgaaacgcaaatcgattttgtttctctatttactcttgctagcgattggcttggcttatgagacccagtcactgacagaaggctggatgtctggtagccagtacgggattgtgggactttcaaccttgatccttttggtctatgcaattcctgctgtctgggctctctttcattttgctaagaagtggaagttatcttgggtaccggttctcttttctttattaggtgggggctttgttgccggttggttgtctagctttgccaatacctatttccatgacatgattcaagcgatcgctccaaatagcgacttttggaaccagtacgagagtgccatcgctgcgccactctttgaggaaccctttaagttgattcctatcttctttgtcctctatttgttcagtgttcgtcgcctcaagtcgatcttcctcttggcgattgcctctggtcttggtttccagatcgtcgaggactttgcctatattcgtcaggacctgccggaaggtttctcttacacggtgtcagggattctcggccgtgtggccaatgcacccatgtctcactgggtctacacaggtcttgtcatgctagggctcttcctaattgtccaagcaagcagaggacgcaaggatttacgtctagcaggctggggatacttagtagctgggtttggacttcattttgtagggaattcaccattctcacaaatcgtgaccgagttgccgattgcgattccagtcttgaatgctactgggctcttcctaatctaccaagcttatcaaaccgtcgagcgattagaacaagcaaaataaaacaaaaaatgcgtatgtgtggaaacatacgcatttttgttattttccaagacagaactggctgaagagttgggtgatgagctcatctggagcagcatcccctgtgatttctccgaggatttcccaggtgcgggtgaggtcgacttgaagcaggtcgaccggcataccgagagccaagccctcgttgaccgcttgcaggctttcaacagctttttcgatgagggagatgtgacgagcgttagaaagataagtcgcatcttgctcaaccagcccagcattttcgaagaagagggcgttgatccggtcttcgatttgatcgatgttttgatttttcagaacggaaatcttgatatgatcttccggcagttggtcgatttcgatcttctctggaaggtcaaccttgttgaggaggatgatgcggttgctatcttgagagatctcaaggagctggcgatcttgatcggtcaggggttcgctagcattgaggaccaggaggaccagatcagcttccttgagggcttttttcgaacgttcgacaccgatttgctcgacgatgtcttcagtctcccgaatcccagccgtatcgaccagtttgaggggaaccccattgatgttgacgtattcctcgatgacgtcccgggtggttccttcgatatcggtcacgatggctttttcctcgcgaagaagattattgaggaggctagacttgccgacgtttggacgaccgatgatagcagtagagatcccttcacgcaagatcttaccgcgacgggcagtcttgaggagattggtcaagagggcttcaaattcactggtcttttcacggatgatctcagtggttgcttcttcgacatcatcgtactccggatagtcgatattgacttcgacctgggccagggtattgaggatctcttggcgcgtgttgttaatgaggtcagacagggaaccatctagttgcttcacggcgatgttcatggccttgtcggtcttagcgcggataatgtccatgacggcttcggcttgggtcaaatcgacccgaccgttcagaaaggcccgcttggtaaattcaccaggttcagctaatcgagctccttcgcggatgaccaattgtagtatttcattggttacggcaatcccgccgtgggtattgatctcgatgatgtcctcacgggtgaaggttttcggcgagcgcatggcccccaccatgacttcgtcgagaatctcgtccttatctggatccacgatatgaccgtagttgagcgtgtggctcgctaccttgcttaaatctttccccttgaagatcttttgtgcaatggcaaagctgtctgtcccgctcaagcggacgatcccgatagccccctcaccaagaggggtcgagatggcagcaatagtatcaaattctttagtaatcatgtcatttctcttttcctgtagattcatctctattctatcgtaaagtcagcggacgggcaaggttttgcttttagaactaaaacttggaaaggttttcaaataattagtgaaatctattacagaatatgctatactgtaatagaatataaaaggaggtctatgatggtaaacctaaaagaacaggtaggaattaaagcggctgagtttgtcaaagacggcatgattgtcggtcttggtacagggtcaactgcttattattttgtggctgaattgggtcgtcgcatcaaagaagaaggcttgcagatcacagctgtcacaacgtcgagtgtgacctatgatcaggctgaaagtttaggcatcccgctcaaggctatcgacgatgtcgaagtggtcgatgtgacagtggatggcgcagatgaagtggatcctcaattgaatgggatcaaaggtggcggtggtgctctcctcatggaaaagatcgtcgcaaccaattctaaagactgcatttggatcgtggatgaatctaaacaagttgcaactcttggagctttcaagcttccagtggaagtagtgcaatacggggctgaaaatctcttccgtcactttgagcaaaaaggttaccttcctgctttccgtctcgcggatgatcaacgattcgtcactgaccaaggcaacttcatcattgacttggacctcaaggtgatagaggatacagaagctctggcaaatgaactggatcacaccgtaggcgtcgtagagcacggtttattcttgaacatgatttcaaaagtgattgtagggacaccagatggcccagtcatcatcgaaaaatagagagtgggacagaaatcggtaattcgttagaattcgatttcgtcgtcccacctccgcacagttgagtagggctgtaaaagctgatgaaattagcgtagtagagcccactcaaccactgcgtcttgctcgacaatccaaaaataattgagaggctaagacttttgtcccagcctcggatcaaacaacggctctcttcttatagggatatggtataatatagctagtttaataaaggaaagaggcagtatatgtcaaaatttaaacgcatgcacttagttgtgctggattcagttgggatcggtgctgcaccagatgccaataactttgtcaatgcaggagttccagatggagcatctgatactttgggacacatctctaaaaccgtcggcttgaatgtaccaaacatggcgaaaatcggtcttggaaatattcctcgtgaagtaccattgaagactgtgccagctgaaagcaacccaactggctatgcgacaaaattgcaagaagtctctcttgggaaagacaccatgactggtcactgggaaatcatggggctcaacattacagaaccttttgataccttctggaatggtttccctgaagaaatcttgactaaaattgaagaattctcaggacgtaaggtcatccgtgaagccaacaagccttattctggtacagcggtcatcgatgactttggaccacgtcaaatggaaactggtgaattgatcatttatacatcagcagatcctgtccttcaaattgcagctcacgaagacatcattcctttggatgaactctaccgtatctgtgaatacgctcgttccatcactttggaacgtccagctcttcttggtcgaatcattgcccgcccttatgttggagaacctggaaactttacacgtacagccaaccgtcgtgacttggctgtttcaccatttgcgccaactgttttggacaagttgaacgaagcgggtatcgatacttatgcagttggtaagatcaacgatatcttcaacggagctggtatcaaccacgatatgggccacaacaaatcaaatagccacggtatggataccttgattaagaccatgggacttcctgagttccaagaaggcttctcatttaccaacttggtagactttgatgctctttacggtcaccgtcgcaatgctcatggttatcgcgattgcttgcatgagtttgacgaacgcttgccagaaatcatcgctgcgatgcgtgaagatgacctcttgatgatcacggcagaccacggaaatgacccaacttacgctggtacagaccatacgcgtgaatacattccattcttggcttatagcccatccttcaagggcaatggtgtgattccagttggacatttctctgatatctctgcgacaattgcagagaactttggtgttgaaaaagccatgatcggtgaaagcttcttagacaaattgaactaagatgacacgcttcgctctcctcgtaagagggatcaatgttggcgggaaaaacaaggtcgtgatggcagagcttcgagaggagctccaaacgatcgagctggatggggtagagacctacatcaatagtggcaatatcttctttgaatctgctggttctaaagcagaattggtggatttgctgggacatttcttttgtgatcactatccctttatccagtctttttctctcttttcagctgaggactatgcgcaagatctcgctgctttaccagcctggtggcaggaggatctggcccgcaaggatgttctcttttacacagaaggcctcaatcaggatgctatctgggagctggtctcctctttttcgctcggtgatgaaatcatccatcgtgggaatctagggatttactggggcaaatactcagaagagacctacacaaagaccgcttaccacagacaagtcctcaagatgccggattaccgcctgttgaccattcgcaatgccaatacatttgacaaaattggccaatttttaaggaaatcataaaggagatatgcaatgacattattagcaaaaatcaatgaaacagctgcttttttgaaaggcaaaggaatggaagcacctgagtttggcttgatccttggatcaggtcttggagaactggctgaagaaatcgaaaatgccgtcgtagtagactactctgaaattccaaactggggtcgttcaacggttgtcggccatgctggtaaattggtctacggtgatcttgctggacgtaaagtcttggcccttcaaggtcgtttccacttctacgaaggaaacccactagaagtggtgactttcccagttcgtgtcatgaaagtattgggttgtgaaggggttcttgtcaccaacgctgccggtggtattggctttggtcctggtactttgatggctatcactgaccacatcaatatgacaggtcaaaacccattgatcggtgaaaacttggatgactttggtccacgtttcccagatatgtctaaagcttacacacctgaataccgtgagacagctcatcaagtagcagacaaattgggtatcaaattggatgatggggtttatatcggtgtgactggtccaacttatgaaactccagctgaaatccgtgcgtataagacacttggcgcagatgctgtcggaatgtcaaccgttcctgaagtcatcattgcagcgcattctggcttgaaggttcttggtatttcatgtattaccaactttgcggctggtttccaagaagagctcaaccacgaagaagtagtagaagtgacagagcgcatcaaaggcgacttcaaaggattgctgaaagcgattcttgctgaactctaatccaatgaaagtacgactccaaaggctgccctacggactgaggttgcttctagccaccttatcattagggatcgggacaggtctggtcggaattgcctgccattatctgctagaaggggtgcaagggctggcctttggccaagctagttcggatttgctccaacaatttcaagaagctggaggtctccgtagatttttggtcttatgtgtgactgggtgcttggcaactggcttctggtatgtcctgcaaaggcgttatcagatcctgtctattcgtcagcaaatggacttagctggagacagggaaccagcgcccttcccccacctccttcatgcagggatgcaggtggcaattgttggagcaggcgcatcggtcggaaaagaaggagccccacgagaggtcggggctcttctagctggtcgtttggcgaaggggttctcacttgctctcaaagagcgaaaagtcttgatcgcctgtggggccggagctggtttggctgcggtctatcaggtcccctttgccagtagcttgttcgtctttgagaccttaggactcacctacagttggcagaatcttctactggttttgaccagtacttatctggccacctgggtcgctcagcccatcgttggtcagggagccgtttatcacctgtccgcagtttcatggtcggctagcggcttcttacaggctattgtgattgctttcttagtcactcccttggctctggtctttgctttcctcgccaagcgggctagtcacaaacggcggaaggattggacgattctttgggctcttcctctagcctttctagtgctggggagcctagtagcttttttccctatctttatgggaaatggccaggtactagcgcaagccctcttgtctagtcagccgattccttatcttccactgagtcttgcagtgaaggggcttctggtttatctcctcttgcgcaatggtgcttatgggggtaccttgacaccatcatttgcccttgggattggttctggctacctagtgaccttgcttttgacagtccttgggattcatctggatcctgctctagggatgttactaggagcgacagtctttttagggacgaccctagaagctcctctgacagccattgccctgagccttggatttacaggccaaacttggaatttgactattccgcttgtacttgcggctggtctgtcatacgtgattcgaaagagatgggagaagaaatgatgaaggtacattttgtactgcatgaaacctttgaagtgccgggcgcttatctaaaatgggcacaggagcgtggccatcaagtgaccacgactaaagtctatgagaatgaaaccttaccagagtcagtggatgagattgactttttgatcgtcatgggaggacctcaatcaccggatgaaaatcgggaagcttttccatactacgatcctcaggcagagattgagctgattcaaaaagccatcaaggctgatcgttatattgttggcgtctgtcttggtgcccagctactgtctgtcgcctatggagcgaagtatgagcacagtccagaacgtgagattggggtttatccagtgaccttgacgcctgaaggactcacagatccacatgtcggtgagtttggagcaactcttgaaactggccactggcatggcgatatgcccggattgacagaagatgctgttgttcttgcgactagtcaaggatgtccacgtcagatgattcgctttagtccgaaacactatgccttccaagctcacttggaatttgatccagaagcagttgatctcttgattactgctgacggtgaaaatgttttggaagaacaaagtcaaaacctgacctttgttcaaaaacctgaagccattcgtgcttacgattatcgagaaatgaatgccaaactctttgcatttttggattcattaacaaattaaatataaaagaaaggtagagcgtgtgttctaatttgaacacgagcggaaagctctcctaattactcaataaaaaaagaaaggatgggtttaccgtattcgctgaattgaatacgggcggagaactgtgtaaaaaagataaactgtctagcatctgcgatgcgtcgtcagtttcctatttttactttgcctctttaacgcctattctaaaaaataaaaaagaaaggtagagcatgtgttctgatttgaacacgagcggaaagctcggaaaatagataatctgactgagaaatcaggatttctcgtcagattcctaattttcagtcgctttctggtcgctctttgtatcataaactatgtctatccatattgctgctaagcagggtgaaattgctgataaaattcttcttcctggggatcctcttcgtgcgaaatttattgctgagaatttccttgaagacgctgtttgcttcaacgaagtccgtaacatgtttggttacacagggacttacaaaggtcaccgtgtttctgttatgggaactgggatggggatgccatcgatctctatttatgcgcgtgagttgattgtcgactacggcgtgaagaaattgatccgtgtgggaacggctggttctttgaatgaggatgtgcatgttcgtgaattggtcttggcacaagcagctgcaaccaactcaaacattatccgtaacgactggcctcaatacgatttcccacaaatcgctagctttgatcttttagacaaggcttaccacattgccaaagaccttggtatgacaactcacgtcggcaatgtcttgtcatcagatgttttctattcaaactatggtgaaaagaacatcgagcttggtaaatggggcgtcaaagctgtggaaatggaagcagcggctctttactatcttgctgctcaacaccatgttgatgcccttgctatcatgacgatttcagatagtttggtcaatccagatgaggacacaactgctgaagaacgtcaaactactttcacagacatgatgaaagttggtcttgagaccttgattgcagactaatggcaaaattctttcatgatgaatggctctacgatctccaaaattatcactacagccgggctctgcgttctatcaagcagcaggaagaagtaccggatttgttggtgagtttactgcagttaatggcggagcgtcgagagctcaatatccaacccgtcatgaatcaaaagttgagaaccgagttgctagaagcgactggttttcagcttttttggcatgaagaaccagaagatgagcagttggccaattacctctatgatctcgaagcgaagttgcgaaatgagcagattattgactttgttcgtgccgttagcccagccatctataggatctttatgcgattgattcagttgaaaattcctgatataaccaactatattcataactccaaagaatccagttatgaccgttggaagtttgagagcctgcatgcgtcagaaaaccctatcctgcagcaatttcacagtgaaagtgtggtcaattcatccagtttgacggagttgattgtgcagttggacttaccagatagcgtcaaagttgcggctcaacaattgcgggagttagaaaaatcagttcgcaaccccttggcccacttgatcaagccctttgatgaggaagagctccatcggacgacgggtttctcttctcaggattttatgaaaaatttgattgaccttgcaagctacacaggcattcattatgatcaagttaacttttattttgatcaggccaatgctgtcatggaagagctactaaaggagaagtagatggataagattgctcaactacaggagatgattgatcagagtcaacggatcgtgtttttcggaggggcaggagtttccacggagtcaaatattccagattttcgaagctcagacggggtctatagtgttcaggtagggcggcatttgacagccgagcaattggtctcccataccatgtttgagcgctatcctgaggactttttcgacttctataagaaatacttgctctacccagatgccaaacccaatgctgctcatcgctatctggctcggcttgaagagaccggtaagctcaaggcagtggtgacacaaaatatcgatagtcttcatgaaatggctggttctaaaaaagttttgaagctccacggcagcgccgatcgcaattactgtacgggttgccagcgattttatgatttggaagcttttttagctttggaaggcccggttccacactgtctggactgtggcaaggtggtcaagcctgatgtgactctctacgaggagcctctcgatatggaggtctttagccgagcagcccaagccatccaagaggctgatctcctgattatcggtggtacctctcttgtggtctacccagcagccagtttgatccagtatttccaagggaagaagctggttgtcatcaataaaaccagtatcccacaagacaagcaagcagacctggttatcgaaggaaaaattggccaagtgttttcacaattaagacaataaaaaatatctgagtgaacatgagacactcagatattttttacttatcaaacttcacttcctcaagcaagtactcgatgaatttttctcccatttttgagagggctgttttttcatgtttgatgtagaccagctcgatcgggtcttcgatatcaaggggaatggagacgatgttattcccgttgagattgctgttgaggatcccggtcgcaatggtgtagccatccagaccaatcaagagattaaagagggtcgcgcggtcactgacgacgatggatttcttatgatgctcttgagagaggatctcttctgagaagtagaaggagttgtgggtcccttggtcatagctaaggtatgggaaatcttccagatctgacaagtgaacgatctctttcttggcaagaggattggtcttgctgacaaagatatgaggttgcgctgtaaagaggtgggtggcaatcaggtgattatcatccagcatcttagagaggacatctcggttgtagctattcaaaaagagtacgccaacctcgcttcggaaattcttgacgtcatcgatgatctcccaagtccgcgtctcccgtaggaagagctcgtatttttccatgtcgcttttcttcaatagtgaaacgaaggcctcaaccacgaaggcgtagtgctgtgaagagacgctgaaaagctcacgagagcccacaggatttttatatcgctcggacaagaggtcgatctgctccaccacctggcgggcataagagaggaactccatcccatcgcgggtcaaagtgatccctttaggattccggataaagatttcaatccccatctcattttccaagtccttaacggcattggaaaggctaggttgcgtgatgaagagttgttttgcggcctcattcatagagccggtttcgacgattttgataatgtattgtaattgttgtattctcatgcttttattttaacataaaaaagcgcgtttttcccgtaaaatgtggtctttcaaggactgtatcagagaataagacaggctgagggaggtaataggaagtaggctagatcaaacatttaaaaaatagaaaattggaaacaaaatctccatctggggactgattttgatggaaaaatacagttttgccttgattaaggggtgagctgattgatagaatggtaaaaaattgattgaggagatcttatgaaaaaactagtgtcctggtataagaaaaaggataaggaattggaaacccatttcacatccggtctgttgcagatcaattttgtgaccaatgcactgattctattagccttttacatctattttgttgttagtgagtcgatctatgcaataaaggatccattcattcaatttagttttcttgctatagtgtcctttacgatggaggttttgccctatggtgtgaccttagccctctttgtccccaatatttttgttatcatttatgggatcggtcggtggtctagcctccagtacaaagaagctgaggaagaagctctcgaagatccggatttgtttgaagatagggtgccgaaggaaggagaagggacaagagaagatgacgcatctcttatgaaggaaaagcaagaatcacctaatcctaagcctgtcaaaaagaaaaagcaacagcctacaattgttctttggtttggtctctttggttgctttctcgaagcgattttcatttacatcgtcaaggagatgaccttttacgattggagtgagagtttggtcaattctcagaagcatgccctgatctggtctggcgcctatccgaccttcttcacactggcagctcttactttactagccttgattatctattcctaccgggatgcgaattcactctcgccgttagcaaatgtcttctgcatcagtggcattctaggaggagtggttctcctcttagtttttgataatcaactgcaggtagcaagttttcacacctttttcttactgatctattccatccatctcttatgggttcgcatcaaggagtggcaggaagatcgaacagagataagctatgagaatcgtctgcttcaatggctccatcagctcttaaacaagtcgcgtaactggccatggctagcagttcttgttgcccttccaacccttgctctcgttgtcctcgttctcatgctctttgggcagcaaccggattccatgatcaaggcctggaccaatacagctgactgggccttctcacagaagatccctcctcagaatctcatcattgatgagcactatctctgtacggttgcggctggtggtcatgaaaatgttgtcaagccccagcggatgggtgtccgccagggtcatccagtcgttgtcaatcgccagctttgtattgccaatgcctttgaacaggtgctagaagaaaagacgccacgtttccatcgcttcttgcgtcgcaattatgaccgctatggttatccctttgccaaacatatcaagaagaaatgggctatggacctgatctattacctgatgaaaccgttggaatggctctttttactggttctttatctagttgatcgcaagcctgaaaaccgaatcgccatgcaatacatcaaaccgatcccagaagatttcgaccctcgtaaagcatcctgagttactgattttacttgacaagcgagaaggagcgcgatataatgagacaaatttaacctttaagaggtccagagaggcctgcaaggaaagacagaaaaaagatcagcagactgtgtctagctgatcatttgtagggccttgcttttgcgaggtcttttttgctgatagaaagaagaggatatcaatggtcagtgacagttgtaaaaaacgctttggcaaaatcatgatggaggagatggagctagtcgctcaagaagagattgctccccgcatctattctatgatattaaaaggagaaatggtggcgcagatgctaccaggtcaattccttcatatccgcgtccctgatgggtccaagctccttcgccgtccgatttcaatttctgagattgatcctgagacacagacgtgtcgcttgatctaccgcatcgaaggtggggggacagctatcttttcccagttgccaatcggtagcaaactcagtgtcatggggcctcagggaaatggctttgacctcaccaatctcggccaaggtcagaaagccttgatcatcggtggcgggattggtgttcctcctttggtccaagtggccaaacaactccatgagcaaggcgtggaagttgaagtggttgtcggctttgcgaccaaagaagctgtcattttggaagaagaactttctcaggtggctcatgtcactgtaacgacagacgatgggacttatggcactaagggctatgtttctacggtcattgatcagatggaccaggagtttgacgctatctattcttgtggggcacctggcatgctcaaatatgtcaataccaaattccatgaccatccccgcgcctacatttctatggaatcgcgtatggcttgtgggatgggtgcttgctatgcctgtgtggtgcatctagaaaatgaaagccaagcagccaataagcgcgtgtgtgaagacggaccggtctttgaaaccggtacgattgtgatgtaggaggaccttatgacagcaaatcgactaaccgtatccttacctggtttagacttgaaaaacccgattattccggcatctggctgttttggctttggtcaagaatatgccaaatactatgacttagacctgcttggatccatcatgatcaaggcgacaactgctgaggcacgcttcggaaattcgactccacgagttgctgagacaccggcaggcatgctcaatgccattgggctccaaaatccaggcgtagacgtggtcctagcagagaaactcccttggttggcccaacattatccagacctaccgattattgccaacgtagccggcttctccaatgaagagtatgcaacggtatctaggaagatctcgcaagcaccaaatgtcaaggccattgagctcaatatctcttgtccaaacgtagaccatgggaacaacggcctcttaatcgggcaggttcctgagttggcctatgcggctgtgaaagcagcggtagaagcgtcctccgtccctgtctatgtcaagttaacgcctagtgtggcagacatcacgcaggtcgcaaaagcagcagaagatgcaggggcgactggcttaaccatgatcaataccttggttgggatgcgctttgacctcaagactggtaagcccatcattgccaatggcacaggaggtatgtcgggaccagctgtttttccagttgcattaaaactcatccgtcaggttgcccaatccactaaacttccgattatcggaatgggaggtgtggattcagcagaagcagccatagaaatgatgattgcaggtgcctctgcgattggagttggaactgctaatttcaccgatccttatgcatgtccaaccatcatcgaagatctgccacaggtcatggatcgctatggtattgacacccttgagaacttccgaaaacatgtacgggaaaatctactgtaaatccttgacttttcccaaatatcgtactacaataaataaaaacctttaaagcagtccagagaggctcctaaggtctagacggtgaatcatggtagttgttcctacctaattttcgtgtaaccttgcctcgggcaaggtttttttgtagacaaaatgatcaatcaaaaaaggagtaatccatgcgtgaagaacgtcctattatcgcccttgacttcccagctttcgaggatgtcaaacactttttagagcattttccagaagacgaaaaattatttgtaaaaatcggaatggaatttttctatgcagttggtcctgaaattgtacattacctcaaagggcttggacacagtattttccttgatttaaaattgcatgatatcccaaatacagtcaaatcagccatgtccgtactggggaccttcggagtagatatggtgacggtccacgcagccggtggtgtagagatgatgcgcgaagccaaggcagctcttggtgaaggagctaaattggtagccgtgacccagttgacttctaccagtgaagaagacatgcgtgattgccaaaacatccaaacaacggtccaagaatctgtagtcaattatgctcgcaaggcccaagaagcaggcttggatggcgttgtctgctcagctcatgaagtagccttgatcaaggatgccacttcatcagactttgtctgtgtaacaccagggattcgtcctgctggagctgaaatcggcgaccaaaaacgggtcatgacgccacaagaagctcataaaattggatctgactatattgtcgttggacgcccaatcatccaagcagaaaacccatgggacgcttaccatgaaattaagagacagtggaatagttaagaacgtctaagaagctgtgcttcaagacgttctacgggaagcccgatagggccttctctaaactattcactaacttagttgaaagaaaatgatcgtttctttcaactaagtgtcggaacttaaaaagtccatgggaccttccctaacgcgttcactaacctgtaatgttgttgtttaaatcaataattgatttaattcgtatatgattaaaatcgtaaaaaggagtcgttatgtcattagctaaagatattgctagccatcttttaaaaattgaagccgtttatttgaaaccagaagaaccttttacttgggcatctgggatcaagtctcctatttatacagataaccgtgtaaccctcgcttatccagaaactcgtaccttgatcgaaaatggatttgtagataaaatcaaggaagctttccctgaagtagaagtgattgcaggaactgcaactgcagggattcctcacggtgcgattattgcggacaagatgaatttgccatttgcctacattcgtagcaaaccaaaagaccacggtgctggtaatcaaatcgaaggccgtgtaccacaaggccaaaagatggtcgtagtggaagatttgatttctactggtggttctgttttggatgctgtcgcagctgccaagcgtgaaggggcggacgttcttggtgtcgtagccatcttcacctaccaattggagaaagccgataagaaatttgcggaagctggcgttcaacttgaaaccttgtctaactatactgaattgattcatttggcagaagaacaaggttacatcacttctgaaggtttagagttgttgcaccgtttcaaggaaaaccaagaaacttggcaaaataaataatacaactgaagcgtttctaacgcttattttttatactcttttcactagttggtggttaacttgaatctcaaagtaaaatccggtatgatagtagtaattgttcttatggatgaaagaaaaactatttttaagggagaagaagatgtcaaaagaacattatttgcaaatgaagaaacaggctcgggtctggtttaccgttaatatcgtcatcagtttgatcgctattgtgggaggaattttagtggtcattagtaaatcacgtcatatcccatttttattgatggccttgggggcactgactttgatgaaccaagtcttggttacccctgttttcaacgccaaaaaagaagctgaggaagaacatccagaatggaagagcttgtctactaaagatactaaacttcctgcggagaatctgcagaaaggggttttggtatcagctacggctcttctgattgtcattattggtttcttcatgttctatcgtcctcttccgacaacagacgcaggaactgaagtgatcaaaacctatcgggagattcagactgttccggatagttcaacagacaaagaatctaggacggtctccgatttaactcctcaggatgttcaaaccttacaagaattgaaggaagaaatcgaatccaatgctccatcagattcaaattcactagatataaacaaagcaaaagatcttgcagaaaaagcgcagcaacagaattggttgaaaagaggagaataagatgacttttcaagtggtttgaattcaactagtttatgtgaaagggtaaaaaacaaatgacagtaacaacattctggcttagtttgggaatcttgacccttgttttcttgatcatgctgcttatcttttacaccttgtatcgccgtgaaataaaagtgaaaacagaatcaaccgcaaaagttctgggagaagtagttgcttttgattccaaaaatcaactgcttatttctctgcctgtggtggagtatcaagtcgagggtgaaagataccaaaagaccttttcctacgcttattttagggagacttcttccaaatctaggcaggccaatgttttcgatagaacctatgttcttggagccggcaaaaatctggatttgcggatgatattcccaattgggtctcctatgacagttttttataatccagtcgatccacagcttggttttgtcgaacgatatgccggcttagtcggtttctataaaatcggaatgattctaacggttggaatttatcttgggttagtatgtattctagctttgttaggttgaattgttccgacctatctgaaataaaaagcacattcatatatgtttggttgaatgagaggattttcaatgatcaaaagaggtcaatgttttaatatcagtttgaatgggaaaaggccactctgggggtactttttgttggtgacagatcaaggggaagaattcatcgtcaaacgcaatagtaaaatccctttcgacaagtaccgaaaagtgtaccagaccaaccattcgtttaaagatcaaattttttcaaagaaagcaccagcaaatatttattctttgattggtgttccactaggcctattattagcaaggacatttagaaagatccttcccatggaccttttctttgggaaagcaaatcttgatttgaatgttagagaaggggcgataaatgtctttttgtttctatttgcagttatgatcactttatggctggtcgctattgctagatatgtgcagttgaaacggtttgttaagaaaaatgaagcagaactagtatttgttggtcagataaaaccagtagagtatcttcaaaaaacagcaaatggaatcgaggtgtggtgaatgcgaaaaataagaaaacgtcaattgtttgccctggtttgtttaagcatgatagtcctgtttttagcatattttgttcaaatgcgcttgtttttgggattgattttatatttgttggtcgttctcttttatagaggccttgaattcacagagcctcgggaaatagagtttgattttaaggaagatcctaaagattaaagattattccccaaccttaatgatttcctaccaccccataacagcagaaatgctgtttttttgatataatggacctatgttatcgaaaagtaaacgtattctatttgggatgcttcatgttgtcatgttgctagtgatggtccactggttcttgatcagtgtgacctatctgagagagatttcatggctagccattttaggtgctggattgctatttctgctagcctggttgaaacgagatgggctaaagagtgcctttgcttggttgactcggcacaaaaaaggcttcttacttggtgcccttgtctttcagttgattgtcatggtctgtgcggagctttttatccgtcgggatgctgcagttgttttcaaaggggcttttgatcttctgaagcaatcttccataaccaactacctcagtcgcaatcccaataacattccgctctttctttacgagaagtttttctatgtcttatttggctctagcggtctgtgggtcatgcaggctctcaatatcctctatgtcaatctgggagcagtcctcttgtacaagctgtcccagaagcatttcaatcaaaaaacggctgatctagcctatctcttctatgtgagcttgatctgttactcgccttatttctattccatgtacacggacattccgccacttcctttgatcgctcttcagttatggtgggttttggatctcttaaaggaagatcaagcagtctcctggaagaagattgttggcttggggatcttatctggcgtgaccatgttgatccgtccaacgacgattattgtcatgattgccttttgggctgtactcttcttcagaggaaattggaaggcctttggaaagattgctacggtgaccgtgatgatgacgggttttgtctttgcaggattgaatacagcggtcaatcatcaaagagttgtgccgatcttgaaacaagaagggctggctaaaggaccgctcttatttatcaatctgggcttgacggatatggggcataaccaagaagatatgaaagaaggcttgttggcctatatcgatgaggataagcgctcggattacaacaatggcctctttaaaaaagaaaatgtgatcaaagaaatcaagcgccgtctcaaggagtacggaccgttcggtttgatcgggcatatctactacaagcaatccttgacggtagcagaagggaccctgggctggctctaccgagatgtagagtatgagaagacgccttttatcaatcctctctatgcacccctgactaaaaataatggtctggcaaaatgggtgcggacttatttcctcagcattgatcgcccgcagtacaagtattatgaatttgtcaagcaggtgatctggatcgtcctatcggctggtttggttggggcttatctcaaacgtcgagatacagatgactttaacttcctttccttagcagtctttggtggtttgctcttcttaaccatctttgaaggtgggaagacccgctacctcatccaattcttaccgcaaattttactagtcgcttcgatcggtctagcaggatttaccaagaaagaaaatatctaaaagctcctgcttgtttgacaagcagaaaaagaggttggacaaaaatgtccagcctcttttttatccagtggatctgcgccaaatgtggtataatgaaaggtaagaatttattggatagcggagagtttccatgcagcattcaccctggcatgaagccatcaaatcccatcttccagaagggtattttcaccagatcaatgactttatgaatgaagtctatagcaaaggagtggtttatccaccgcgtgacaaggtctttaaggccttgcagacgacagacatggatcaggtcaaggtcttgatcttaggccaagatccctaccatggaccggatcaagcgcagggcttaagtttttctgttccagatcatgtaccagcgccaccttctttgcaaaatattctcaaagaattgcgctcagatatcggagagaagcgttcccatgatctgacttcttgggcagagcaaggagtgctcttgctcaatgcctgtttgacggtgcctgctggtcaggccaatggtcatgcaggacaaatttgggagcctttcacagatgctgtgatcaaggtggttaatgagttggaggagcctgttgtctttatcctctggggatcttatgcccgtaagaaaaagcctctgattacccacgatcgacatttggtccttgaatcagctcacccaagtcccttatcggcctaccgaggattctttggttcccaacccttttcaaaaaccaatcaatttttgaaagaggcgggacgcgagccgattgattggttaagataggagaaaaaatgccacaattagcaacgatttgttacattgacaatgggaaagaatttctcatgttgcatcgcaataaaaagcccaatgatgtccatgaaggtaaatggatcggagttggaggaaaattagaacgcggggaaaccccacaggagtgtgcggcgcgtgagatttttgaggagacgggccttagagccaagccagttttgaaagggattattacctttccggagtttactccagatttggactggtacacctatgtcttcaaggtaacggattttgagggagaactgatcgagtgtaacgaagggaccttggagtgggtaccttatgatcaagtcctctcaaaaccaacctgggaaggggaccacacctttgtcgagtggttgttggaggataaacccttcttttcagcaatgtttcgctatgacggcgaccgcttgttagagtcgcatgttgatttttatgaataaaggagaatgcaatggttgtcattaaaaatggtcgcgtaatggatcccaagaccggcttggatcaagtctgtgaccttcgtatcgaaggaaagaaaattgtagagatcgctgaaaacctcccaacggatggacaagaagtccttgatgctactggtctggtggttgctcctggtttgatcgatgtacacgtgcatttccgcgaacccggtcaaactcataaagaagacatccatacgggtgccttagctgcagctgctggtggttttactcgagtggtcatgatggccaataccaatccgaccatttcagatattgcaactttagaggaagtcttagcttctgcagccaaggaaaatcttcacattcatacggttgcgacggtgactaagaactttgacggtcaacacctgacagattttgaaggactgcttaaggcaggtgcagtgggattttcagatgatgggattccccttcaaagcactaaggttgtccgtgaagctttggaagaagctaagcgtctaggaacctttatcagtctgcatgaagaagaccctgagttgaatggcattcttggtttgaatgagaacattgccaaggaacacttccatgtctgtggtgcgacgggtgtagccgaatattcaatgactgcgcgtgatgctatgattgcccatgcgacaggtgctcacctccatatccaacacctttccaaggaagaaagtgtcaaggtggtggaatttgcccaaggattaggagctcatgtgacggcagaagtggcacctcaacacttttcgaaaacagaaagtctgctcttgactaaaggaagcaatgctaagatgaatccacctcttcgcttggaatctgaccgtctagcagtgattgaaggcttgaagtcaggcgttatctccgtgattgcgactgaccacgcgcctcaccatgctgatgagaagaatgttcctgatattaccaaagcaccatctggaatgactgggcttgaaacttcgctttctcttggtttgacctacttggtgcatgctggccatttaagcctgatgcatttgcttgaaaagatgtcctataatccagcacgtctctatgattttgatgctggctatatcgcagtggatggaccggcagatttgaccatctttgatccagaagcagatcgtctggtatcggatcatttcgcttcaaaagcgggcaattcaccatttgtgggtgaaacattaaaaggaaaagttgcttatacgatctgtgatggacaagtgatttttcaaggataggcgatcgtattcatatgaatcttaaaaaaatgatgcaaggcttggttttctttataaccagccttcttgtctttgtctttctatttcgagctttgctaccaactgcatcgcctcgcatgaccaagcctaaaacggctgcgaaagaaatcacctatatttatgtagctctaggggattcactgaccgaaggtgtaggagatagcactaagcaagggggctttgtacccatccttgcccaaagtctgtccaatgaaaatgacggccagtaccaacctgtcaactatggagtagctggaaatacaagcgctcagatcttagatcgactcaagaagcaaacagatcttcagaaggatctcaaaaaggcgcgtgtcatgaccttaacggttgggggaaatgatctgcgcaaagtcgttgttgatcatttgagtgatttttctctatcagatatccaaaaaccgctcaagagttatacagcgaacctcaaagaaattattacaaaggccagaaaggacaatccccatcttcccatttatgtagtggggatctacaatcctctttacctgaattttcctgaattaaccagtatccagacggctgtcgatcgttggaatgagaagacggaagaaaccatcgcgcaatttgatcaggtctatttcgttccgatcaatgatgccctgtataaaggaatcgacgggaaaatggttgtgtcagaagtcagtgatggcaaagcgacgattacaaacgatgccctgtatgaagaggatcgttttcaccccaacaacacaggttatgaaaagatgaaacaagtaatattggagaaaatcaatgccacgaagaaaacttggagtcaaaaataatcccatcaaagagaaggtccccttccttcaaaaaatcaatatttggaaatggttgtttttaggcttggtcagccttctcttagcctttgctatagtcgtgcaaggacgcttagcgacgccaagagaagatgttagtcagcttcatcaaacagttggcaccaaagatgtcaaagttggaactatgacgacaactcgtgatcaactcaatgacaccatcaaatctcttctgaaaaaatataagctgtccgactacaaggtctatgcggacaatcagcaaatcctattagaaggacagttgagtctcttagggaaggattatcccttatacatttactttcaaccatccaaattggaaaacgggaacatcctcttgacggtgaaggatttttcagtcggaacttttcaaattccacaaaagatggttttgcagctcttgagcaagaataaaactattccagaatttatccaaatttcaccaaagcagtctaccatcaccattgtattaccagaaattgacaatgactttggaatctatgtcaaggccaataccattgacctctataatgataagatcgtttttgatttgtatcagaagaagtagggcggaaagctttattttgtttctattcaaaaaattcagaatattacggaaaattcttgacattgctttttccctatgctaaaatactaaacaagacattgaacaaaggagaaagtcaaacatgaaaacagctaagtttattcaatttgctttgttgttgaggtataagggctagtgcagaagcattagtcctgtttggcttaccaagcgggcaaaaacatctcgcttggttaaccgagtgagatgtttttctttatatccactacatagaaatgaggagaccctatgcgtaaagttgaatttttagataccagccttcgggatggcgaacagactccaggagttaatttctctatcaaagaaaagattgccattgctaaacaattggaaaaatggggcatttctgctattgaagcaggttttcctgcagctagtcctgattccttcacagctgtgcaggagattgccaaggtcttgaccaagacagccgtgacaggtttggctcgttctgtcaaatcagatattgatgcttgttatgaagccttgaaggatgctaagtatccacaaattcacgtctttatcgcaaccagtccgattcaccgggagtttaaactcaacaagaccaaggaagaaattcttgaagccatcaaagagcacgtttcttacgctcgctcaaaatttgaaattgttgaattctcgccagaagatgcgacacggaccgaattggatttcctcttgcaagtcgttcagactgcagtcgatgcaggggccagctatatcaacattcctgatacagtcggtttcacgacaccagcggagtacggtgccattttcaaatacctgattgaccatgtcaagacagatcgcgagattatctattcacctcattgccatgatgacctaggtatggctgtggcaaatagcctcgctgctgttaaaaatggtgcccgtcgtgttgaaggaaccatcaatggcatcggggagcgggccggcaatgcggcgcttgaagaagtagcggtcgcccttaatattcgcgaagactatttccaagttgaaagtccgatcgtccttaatgaaaccatcaacacttctgagttggtctctcgttactctgggattccaattcctaaaaacaaggcggttgttggtggcaatgccttctcacacgagtctggtattcaccaagacggggttcttaaaaatcctcttacttatgaaatcatcacccctgagctggtgggtgtcaagagcaatagcctccctcttggaaaattgtctggtcgccatgcctttgtcgaaaaactgcatgagttgggactggaatttacagaagaggacatcaagccgttgtttgctaagttcaaatctctggcagacaagaaacacgagatcacagatgccgatatccgcgcccttgttgccggtacagcagtggaaaatccagaaggattccaatttaatgatcttcgcttaaccaccaatgcagacgaaacgattacagcagcggttagcctccgcaatgaagaaggggaagtacttgaattccttgccaatggtcaagggtcggttgaagcgatctttaatgcgattgataaattcttcaaccaaactgttcgcttgacctcatacaatatcgatgcagtgacagatgggatcgatgctcaagcccgtgtcttggtatccgtggaaaatgtcgataccgatacgattttcaatgcctctggtttggacttcgacgtattgaaagcttctgccatcgcttatatcaatgccaacacgctggttcaaaaagagaatgcgggtgagatgggacgagctgtctcctaccgtgatcttccacaagcctaagaggaactgaacatgacaaagaaaattgtaacacttgcaggagatgggattggccctgagatcatggcagctggactagaggtcctcgcagccgttgctcccaaaattggctttgattatagtctagaagacaaaccttttgggggtgctgggattgatgccgctggccacccacttccccaagatactctcaaagtagctaaaggagcggatgctattcttctcgcagccatcgggagtccggaatatgacaatgctcctgttcgtccagaacaaggcttgcttgctattcgtaaggaattaaatctctttgccaatattcgtcctgtacggatttttgacgccttgaaacacttgtctcctttgaagccagagcgtatcgagggtgttgactttgtggtcgtgcgtgaattgacaggtgggatttactttggagagcatatcttgaaagaagatacagcgcgcgatatcaatgattacagtgcagaagaaatccgtcggattatgcgccaagccttcaagatcgcgcaaggacgtggtaagaaagtgaccagtatcgataagcaaaatgtccttgcaacttctaaattgtggcgccaagtggcagaagaagtggctaaagaatttccagatgtgaccttagagcaccagcttgtcgatagtgcggccatgatcatgattaccaatccagcccgctttgatgttgtagtgacagagaatctattcggagatatcttatctgatgaatccagcgtccttccaggaacactaggcgtgatgccatctgctagtcattctgaccaaggaccaagtatgtacgaaccgattcatggttcagcacctgatattgcaggtcaaggcattgccaatccgatttccatgattctgtccgttgccatgatgctccgagacagttttggagaaacagcaggtgcagaaatgatcgaagaagctgtcaatcaaaccttgaatcaaggaatcttgacgcgagatctaggtggtcaggcttctactgctgagatgactgcagccattattgggaatctctaagatgacttggagagatcgctgtttagttgttattgctatttggaatagtatcgtatttctgacctatggtttagataaacgaaaagctatccaaaacaggtggcggattcctgaaaaggtcctgttacttgagagctggctgcttggtggatttggagctctactaggtggatatctttttcaccacaaggtgcggaaatggtattttcaagccacctggtggggcagtagccttcttttagcaggtgtcctctttctaatccttcaatggatttcctaacaagaagataaatggagaaagacgatgagtggaaaatctatctttgataaactttgggaccgccacgtgattacaggagtggaagggcaaccccaactcatgtatgtggaccaacactacatccacgaagtgacgagtccgcaagcctttcaaggattacgggatgcaggacgcaaggttcgacgacccgatttaacctttggaacctttgatcacaatgttccaacggtcaatatttttgatattcgagatgtgatttcaaaagcccagattgataaattagctgagaatgtggtggactttgggattgatcatgctgcccatggttctgctaagcaaggaatcgttcatatggtgggccctgaaaccggtcggacccagcctgggaaatttattgtctgtggagacagccataccgccacccacggagccttcggtgccatcgcctttgggattggaaccagtgaagtggagcatgtctttgctacccaaaccatttggcaagtcaaaccaaagaaaatgttggttgaattcaccggaaccccacaaaaagggatctattcaaaggattacatcctagctttgatcgcgcgctacggtgttgcttgtggagttggctacgttgtagagtatcggggagaagcaattgatcgcttgaccatggaagaacgcatgaccatctgtaacatgtcgatcgagttcgggtccaaaatggggatcatgaatccagatgagacgacctttgactacctccgaggacgtgaatgtgtgccagatgattttgaggccgcagaagctgattggaagactctggttagtgatgacgacgccgtttatgataaggtcatccgtatggatgtatctgatcttgctccgatggtgacttgggggaccaatccttctatgggagtggacttcgagactccttttccagagattcgcgacatgaatgatgaacgggcttatcattatatggatctagaacctggccaaaaaccagcagacattgaactaggctatatctttatcggttcttgtaccaatgcgcgtctcagcgatttggagttggcagccaagtttgtgaaaggcaaaaaaattgcgccaaacttaactgctattgtggtacctggatctcgtccggtaaagcaagccgccgaaaaattaggcttagacaagatcttcatggatgcgggctttgaatggcgtgatccaggatgctccatgtgtctaggaatgaatccggacaaggtgccggatggagtccactgtgcctctactagcaaccggaactttgaagaccgccaaggatttggggctaaaacccatctctgtagcccagcaatggccgctgcagcagcaatcgctggtcgctttgtcgacgtgcgccaaatgccagaagtcgagtaataggaggaagcatggagaaatttaccatttatacggggaccacagttcccttgatgaacgataatatcgatactgaccagatcctccccaagcaattcttaaagctgattgataaaaaaggttttgggaaatacctcatgtatgcttggcgctatttggatgaccagtataccgaggatccagattttatctttaacaagccagaataccgcaaggcaaccattttgatcactggtgacaattttggggctggttcctctcgggagcacgcagcctgggctttagctgattatggctttaaagtcgttatcgccggatctttcggagatatccattacaataatgagcttaataatggcatgctgccgattgttcaaccgctagaggttcgtcaacaattggcaagtttgaagccaacagatgaggtaacagtggatttggaagagcagaagatcatctcgcctgttggagaatttcgctttgagatcgatcaagattggaagcacaaattgctcaacggcttggatgatatcgggattacgcttcagtacgaagacttgatcgcagcttatgagaagaatcggccagcttactggcaatgataaaattgtatacttaattacgaattttctgaaaatatattgaatttgagattattttttgatacaatactaaaaagaatagaaaaggaaagagacttatgacaagacacattcaatgggacggacaactttcacaagaaggatttgatattcttaaaggagaagggggctgtatcgtctgccctactaaagttggctacatcatcatgaccagtgacaaggctggcttggaacggaagttcgaagccaaagaacgcaaccgcaacaaaccaggtgtggttctttgcggaagcatggatgaacttcgtgcccttgcacaattgaatcctgaaatcgaaggcttctaccaaaaacattgggatgaagatatcttgcttggttgtatccttccttggcgtgaagatgcttatgcaaaattgcaggctttcggagatggacgtgaagaactcatgacagacgttcgtggaacttcatgctttgtcatcaaatttggtaaagctggtgagcaaatcgccaaagaaatgtgggaaaaagaaggcaagatggtttacgcttcttcagccaacccttccggtaaaggaaaccgcgggaaggtcgaaggaatcggtgagcgcatcgaaggtgccgttgacttggtcattgaagccgatgattatgtagcttctatccaaccagacaagaccattgaaactcgttatgaacaaggtgtgatggtttctatggttgatgcggaaggaaaattgattccagaacaaggagcaggtagccgttctgtcaatacgtgtccagttgtgatccgtaaaggattggatatcgataagattatgatgcacttatctgatcatttcaactcttggaactaccgtcaaggggaatactattaagaaacagaaaaaagcattccatttgggatgctttttttgtgaaaggataaaagatggtataatagaggcaaacgatgttctaatagaaggggaagtggtatgatctccagaaaagcgtttatcgataaatccaatcaggaaggtttttccttcaacatccaaatcccatggtggaggtacaataacttcaagtcattggtttggaaaagaaggctctctgaggaacaactctatcagatctttcttttactttgtagagaggtagaagaccggcaaatgcaggtagtagaggataagaggaagtatcagaccggattttatgtagtggcatgtaatggccacgagtttcgctttgagtttgcttttaaaaagaaccaagaactaagagtttataatttatttgagaccatcaatggtcgtaagaaactcaccttgatggatctgcttgattacataatggattgactatgtatagaaacaataaagattcactacagattgataaaagaaagagtggttctatgatttcaagagatgcatttttagaaagaatcagccaagagggattttcatttagtattgacatcccgcgcagaaatttttcggattttacatcattagttcggagaagaagaatttcagaagaagacctctaccagctgttttataactattgtcaagaactagaaaactgtttgaaagaagcaggggagaaacgacgcttgctcttcaataagtttccagttagccccgttcatgataaatataaaacgaaatatgatacagtggcacccaacggacgcgaattccgctttgagtttgtatttagcaatgacaatcgtttaaaagtttatcatcttattgaaacggttaatggtcgtaggaaaaaaacacctatggaaatactgacggacttagtcgatgccttataatgaagatctgttcaaaagtataagggggatccaatcaaaaaaactagagtatgcgctctagttttttggttgttgatgggtgatgttctttccccaagggatgagattttcttttttctctttgatccgttggatattgtccttgtgacgaagaataatcaaggtcgctaaggccaagacaatgattgtaaaaagtggatcatatttgtgcaagatccatccagtcaaagggagaaggaggaccgatagaatggcgagtagcgcaacagtaacactcgaaaacgaaatcatgctggttaaatacaggctggctacaaaataaacagctaaaatgagcagcaggataggcgagaaaccaagtaagacaccagcactcgtcgccaccgcttttccacccttaaatccagcaaaaattgggaaagtgtgccccaaaacagctaagagaccaaagaccatcggcgagatcccctgaattccaaagaaagtcggaaggagaactgccaaagttcctttcaagaaatcaatcacaaagacgatgatcccagctttcttccctaaaattcgaaaggtattggtcgttccagtattgcccgagccatgttcccgtaaattaatatggaaaaagattttcccaatccataatcccgaaggaatggagcctaacagataggctaaaattaaaacacttatttcttttatcatactctcattatatcaaaaagccatcgatagaaaaagcaatttctggagttcaagtgtgacatctgaagaaagtgtccagccagctttttttactaagatgtagaaatctccatataaagagaaaaaattttgcaaaatttcctaaaaaactgtaatatagaaaagatgaacaaacaggaggttccttgtggcaaaaaaggaaatcaatattaataattataatgacgatgccattcaggtactagaagggttggatgcggtccgaaaacgtccagggatgtatatcggatcgaccgatggaaatggcttgcatcacatggtctgggagatcgtggataatgcggtcgatgaagccttgtctggctttggatcacaaatcgatgtaacgattaataaagatggttcgctatcagtagaagaccagggacgtggaatgccgaccgggatgcatgctatgggtaaaccaaccgttgaggtgatctttacggtcctccacgccggagggaagtttggccaaggaggctataagacatctggaggtcttcacggagtgggatcttctgtcgtcaatgccctttctagctggctagaggtagaaattacccgtgatgaagctgtctacaagcaacgttttgaagatgggggaaaaccagttacaacactcgagaagattggctctgctcccaagtctaagacagggaccaaggtcaccttcatgccagatccaaccatcttttcaacgacggatttcaaattcaataccattgctgagcgaatcaaagaatcagccttcttgctgaaggacgtgacgttgacgctgaccgatctccgcaaggaagaagataaccatgtggcctttcactatgaaaatggtgtccaagatttcgtagagtacttgaacgaggacaaggaaactttgacaccggttctctactttagtggcgaatcagatggatttcaggtagaggtggccatgcaatacaatgatggctactcagataatatcttgtccttcgttaataatgtccgcaccaaagatgggggaacccacgagacgggtctgaagacagccatcactaaggctatgaacgactatgcaagaaagacaggactcctcaaagaaaaagacaagaatctggaaggatcagactaccgtgaaggtttgtctgctgttctctcgatcctggttccagaggcccatttgcagtttgaaggacaaaccaaagacaaattaggaagccccttggctcgtccagtcgtcgatagcattgtttctgataaattgaccttcttccttatggaaaatggggagttggcttctaatctcattcgtaaggctattaaagcccgggatgcgcgtgaagccgctcgtaaagcccgggatgaaagccgaaatggcaagaagagcaaaaaagacaaaggacttttatctggtaaattgacaccagcccagtctaaaaatcctaagaaaaacgaactctatctagtcgaaggagattcagccggtggttcggctaagcaaggtcgagaccggaaattccaagcgattcttccccttcgtgggaaggttcttaatactgagaaggccaatatgagtgatatcctcaaaaacgaggaaatcaacaccatgatctacaccatcggtgcaggagttggggcagatttctctgtggaagatgccaactacgataagatcattatcatgaccgatgcggatacagatggtgcccacattcaaacccttctcttaaccttcttctatcgctatatgcgacctttggtagaagctggacatgtctacatcgcgcttcctcctctttataagatgtccaaaggcaaaggcaagaaagaagaagtggcctatgcttggacagatagcgaattagaggagttgcgtcggacctttggccgtggagcaaccctccaacgttacaaagggttgggggaaatgaatgcggatcagctttgggaaaccaccatgaacccagagacccgtaccttgatccgtgtcaccattgatgatctagctcgtgcagaacgccgtgtctccgtcctaatgggagataaggctgcaccacgtcgtcaatggattgaagacaatgttaagtttaccttggaagaaaatacggtattttaatcactttctactataaagtaaataagctgggatgtagaaatggtaaggaatcgacatgagaactgatacagaaatgatgaatctaattttgcaaatagctgatactctagaagtagaagcaattgctttatccggatcacgaacgaatcctcaggtccccaaagatgagtttcaagattatgatgtggtctatattgttgagaatctgaacgacttgttatctgatttatcttggctagaccagtttggaatgcgtctgattgaacagcacaatgtccttggacaccgtcgtctgtatctcatgctttttgaagatgggaatcgtattgatttaaccctctgccccatggagtctatccaagagtgggtggacagcgaagcaaattttgaagttataaaagacgtcaaaggcttgtttgaagcctatcagcctaattccaagcgctattggactgctccacctactgaagaggaatttgcagcatcctgcaatgaattttggtgggtatcggcttatgttgttaaggccattcgaagaaatcagctgatctatgcgaccgaccacctctatggcatttgccagcaagaactcctcaaggtcttagcttggctggtgacaagcgataggggagtagttgatatcggaaagaactacaagcacctcttccagtatctaccagccgggcaagagaaggagttctcagcactgcttgatttatctagtatcgataaaatcactcagtctttatttgctaccatggggctattcaatcgagaagctcaaattctggcccaaaagatgggatttacttacgatatggaagttgcagagaaaatgacttcttatgctaaagagaaactttctaatcattaatgaatctattttaaactaaaaaaaggatcctttggttacttggtgtaactgaattcctctatatataaaagactactcaacattctttgaaaggagttgaacacgccctgagtgctgtgtgaaaaagataaatttctaattttcactttgtattttaagggctttgtatcttatgtctaatattcaaaatatgtccctagaggacatcatgggggagcgctttggtcgctactccaaatacattattcaagaacgagctcttcctgatattcgggatggcttgaaaccagttcaacgacggattctttattcgatgaataaggatggcaatacccatgacaagggctaccgcaagtctgccaagtctgtcggtaatatcatggggaatttccaccctcacggggacatttctatctatgatgccatggtccgcatgtctcaggactggaaaaaccgtgagattctagttgaaatgcacggaaacaatggttccatggacggtgatccaccagcagccatgcgttatacggaagcccgtctgtctgaaattgcgggttatcttttgcaagatatcgaaaagaatacagtgccatttgcctggaactttgacgatacagaaaaagagccaactgttttgccggcagcctttccaaatctcttggtcaatggggcaacagggatttcagctggttacgcgacagatattccgccacacaaccttgctgaagtcatcgatgccgtggtctacatgatcgaccatccatctgccaaggtagacaaactcatggagtttttacctggacctgatttcccaacgggtgccattatccaagggcgtgatgagatcaagaaagcctatgaaactggtaagggccgggtagttgtccgctctaaaacagagattgagcagctcaaaggtggcaagcagcaaatcgtggttaccgagatcccttatgagatcaacaaggctgttttggtcaagaagatcgacgatgtccgtgtcaacaataaggtagctggcattgcggaagttcgggatgagtctgaccgggatggtcttcgcattgccattgagctcaagaaagatgccaatgccgatctaatcttgaactacttgttcaagtacacagatttgcaggtcaactacaacttcaatatggtggcgattgacaactatacccctcgtcaagtggggattgtaccgattctctctagctacattgctcaccgtcgggatattattgtcgctcgctcgcgcttcgataaggaaaaggccgaacggcgcctccacatcgtagaaggcttgatccgcgtcatttctatcctcgatgaagtgattgccttgatccgtgcttctgataacaaggcagatgctaaagaaaacctcaaggtcagctacgatttcacggaagaacaagcagaagctattgttaccttgcaattgtaccgcttgaccaatacggatatcgtcaccttggaagaagagcatgccagtctcaaggagcaaatcgcgactttggcagccatcattggggatgaacggaccatgttcaacctcatgaagaaggagttgcgtgaagtcaagaagctctttggtaatccgcgtcgtagtgaattgcaagacactgctaaaacgatcgagattgatacagccagtctcattgttgaagaggaaaccttcgtcagtgtaacccgtgcgggttacattaaacggacctcgcctcgttctttcaatgcctcaacactggaagaagtcggtaagcgagacgatgacgagttgattttcgtagagcctgctaagaccactcagcatctcttactttttaccaacttggggaatgccatttatcgaccaattcacgaattgacagataccaagtggaaggatatcggagagcacctcagtcagaccttgaccaattttgagcaagaggaagaaattctctttgcggagattgtggatcggtttgagggagtaacctactttgcggcaactcaacaaggacaaatcaagcgctttgaacgcaaggaattgagcccatggcggacttatcgttctaaatcgactaagtatgctaagctaaaagaccaagacgaccgtatcgtagcagttgcgccagttgtccttgaagacatcatgattattaccaaaaatgggtatgggttgcgcttcaatattgaggaggtccctgtcgtaggagccaaagcagcaggggtcaaagccattaacctgaaagacggagatcaagttgctgccgcctttaagtcaacgactccaagcatgtacattctgactcaacgaggcagtctcaaacggatgttacaagacgatattcctgtgaccagtcgggccaaacggggactacaggtcttgcgtgagttgaaaaataaaccacaccgcgtcttcaaggcaggtccagttttcacggaccagggagattttgatctctttacgagccaagaagaagtggcagaacaagatcaaatccttcagatcacttccacaacaggtcaggtgacagaagttgatttgacacaattaagcatttctgaaagaacaagcaatggatcctttgtcaacgataccatttcggatcaagaagttttttcagctactatcaaataagagaaagcgtcggtccattctaggactgactttctttgaaaataaattttctgaaaattgaaaatttcgcttgaaattctcatgaaatggtgtacaatagtgtacatagattgagaaactgaatcgacctgcatcagatcgacaaggaatagaaaaaattaaaaggagcactatcatgacagtatcacttgattgggaaaaccttggcttttcatatatgaaattaccttatcgctatttggcacattatcgcaatggagcttgggaaaaaggggaattgacagaagatgcgactttgcatttgtccgaatcttctccaagtttgcattacggtcagcaagcctttgaagggttgaaagcctaccgtacaaaagatggaagcgtccaattgttccgtccagatgaaaatgctaaacgtttgcaacgtacagcagatcgtttgttgatgcctcaagttccaacggatatgtttgtggatgcttgtaaggcagttgtaaaagcaaatgaagagtatgttccaccgtatggtacaggagctaccctttaccttcgtcctcttttgatcggtattggagatattattggcgtaaaaccagcagatgagtatatctttactatctttgccatgcctgtcggtaactactttaaaggtggtttggttccaacgaacttcttgattcaagatgagtatgaccgtgctgcaccacatggtactggggctgcaaaagttggtgggaactacgcagctagtatgttgccaggtaagattgcgcatgatcgtaacttctctgacgtgatttatctcgatccagcgacgcacaccaagattgaagaagttggttctgcaaacttctttggaatcactgctaataacgaatttgtgaccccattgagtccttctatcttgccatcgatcaccaagtactctttactttatttggcagaacaccgtcttggtatgacaccaattgaaggggatgtctttatcaatgatttggatcgctttgtagaagcaggagcttgtggtaccgcagctgtcatctctccaatcggaggcgttcaacacggagatgacttccatgtcttctattctgaaacagaggtaggtcctgtcacacggaaactctatgacgagttgaccggtatccaatttggcgatgtcgaagcgccagaaggatggattgtcaaagtcgattaaaacgaaagcatctgagacaaaagtgtccaagcttcaatgagaacgagtcttaacgaaagaacacagcagctaatgtttctcttcattcgcttttaggctcaaaagagtgccgaatgaccttttcgggggtgggataaagaaggaatttctaactaaattctttctgacccactcccttttctcttgcgtcatcaagagaatttttgtaaaatagaaaaagtgaaaagagggttgaaatgagtaaaaaagataagaaaattgagattcaaatcgttgatagtaaagtaaccgtcggaaaagatacttttgatgggttcactttgtccattggaaagaaaacgattggtgaaattgcagacatggctggtcaatttgccattatcaaaaatggaaatgtggattctatttacaaaaaacttgaaaaagccgttgaaattttaatagaaaattataatttgaataaataagggcttgcaatcataataaatcaatggtataatagatcctgttgatttatatggagagatagcgaagaggctaaacgcggcggactgtaaatccgctccttcgggttcgggggttcgaatccctctctctccattagcgttcattgtgacgatgataaagtgactgatgtcagcgctctttttggggtatagccaagcggtaaggcaagggactttgactccctcatgcgttggttcgaatccagctaccccagttcttaggtaatatcagataagtgataaaatatctatccaggtattttatttctttataggatgagtcgttaaagattgtagttgatctcattgcgagtgcttgcttaggaaaaataattataagtatgtcaagttttagaaaacttgattgttggaggattttttagatgaatgaatttgaagatttgctaaacagtgttagccaagttgaaccaggtgacgttgttactgctgaagtattgacagttgacgcgaaccaagctaacgttgcaatctctggaactggtgtcgaaggtgtcttgactcttcgcgaattgacaaacgatcgtgatgctgacatcaacgacttggtaaaaccaggtgaaacacttgaattgcttgttcttcgtcaagtagttggtaaagatactgatacagtaacttaccttgtatctaaaaaacgtttggaagctcgcaaagcatgggacaaattggttggacgtgaagaagaagttgttactgttaaaggaactcgcgctgttaagggcggactttcagtagaatttgaaggacttcgtggatttattccagcttcaatgcttgatactcgttttgtacgtaacactgaacgtttcgtaggtcaagaatttgatgctaaaatcaaagaagtagatccaaaagaaaaccgctttatcctttcacgtcgtgaagttgttgaagctgaatcagctgcagcacgcgcagaagtatttggtaaattgaacgttggcgatgtcgtaactggtaaagttgcacgtatcacaagcttcggtgctttcatcgaccttggtggtgttgatggattggttcacttgacagaattgtcacacgaacgcaacgtatcacctaaatcagttgtaactgtaggtgaagaaatccaagtgaaagttcttgacttgaacgaagaagaaggtcgtgtatcactttcattgaaagctacaacacctggaccttgggatggcgttgaacaaaaattggctgctggtgatgttatcgaaggaactgttaaacgtttgactgacttcggtgcattcgttgaagtattgccaggtatcgacggacttgtacacatctcacaaatttcacacaaacgtgttgaaaatccaaaagatgttcttaaagttggacaagaagtaactgttaaagttcttgaagtaaatgctgcagatgaacgtgtatcactttctatcaaagctcttgaagaacgtccagctcaagaagaaggcgaaaaacaagaaaaacgtcaatctcgtccacgtcgtccaaaacaagaaaaacgcgactttgatcttccagaaactcaaactggattctcaatggctgacttgtttggcgatatcgaattgtaatattcaaaagaggctaggacaaaagtcctagcctctcaattgtttttggattgtcgagcaagacgcaggggttgagtgggctctactacgctgatctcatcagcttttacagccctactcaactgtgcggaggtgggacaacgaaatcgaattctaacgaattaccgatttctgtcccactctcttttttacttgtaaaattctcaagaatttgatatactataacagttgccacccttagtgtaatggatatcacgtaagattccggttcttgagatgggggttcgattccctcagggtggaaagaagaaaaggttgagtgttctcagccttttatttttttattcaattaaaaaagactctcgaaatttgagagtcttttccaatcagattagttttttgatgcttcttggaattcagggtttttccatgcttcatcaataattgctttcaattctttagcagaagcgtgcattttttgaagttctgcatcattcaatggaatgtttactggacgtacaataccgtgtgctccaacaacagctggttgaccgataaagacatcattgattccatattgaccttcttggaatactgaaagtggaagaaccgcattttcatcatcaagaatagccttagtgatacgagcaagggcaacagcgataccgtagtatgtagcaccttttttgttgatgatggtgtaagccgcgtcacgaacaccttcgaacaattcaatcaattcagattcttgaacgttttgagtgtctttaaggaattcttcaaggtttacaccagcgatgttagcgtgtgaccatacagcgaattctgagtcaccgtgttcacccatgatgtaggcgtgtactgaacgagcatccacatccaatttttcagccaaagcttgacggaaacgagcagagtcaagtgaagtacctgaaccgataacgcgttctttagggaatccagagaatttccatgtagagtatgtcaatacgtcaactgggttagcagctacgaggaagattccgttaaatcctgattcaacaacttgtgttacgattgatttgttgatcgcaaggtttttaccaacaaggtcaaggcgagtttcacctggtttttgaggagcacctgcagtaatcacaacaaggtcagcgtctgcacagtcagcgtactcagccgcataaatcttcttaggtgaagtgaaggcaagggcgtggctaaggtcaagcgcatctccgactgctttttcgtgcaattgaggaatttcgataattccaagctcttgtgcaattccttggttgacaagtgcaaaagcataagatgaacctacggcaccgtcaccgacaaggataacttttttgtgttgtttagtcaaattcatgagtctaaacgtctccttcatatttttttgagatagattctcatacgttttcattctaccacttttgaaagtctttgtcatctaatacagtatgaaacagcgatgtaaacgtttttatgtttgtgttcctaagaagaaaaaaaggctaaaatgtgttataatagtatggtgaattaagtaaagagaggcattttttgaatgcaggataagaatctaattgatgtgaatttaacatcagaaatgaagacgagttttatcgattatgccatgagtgttatcgttgctcgtgccctccctgatgttcgtgatggtttgaaacctgttcaccgtcgtattttgtacggaatgaatgaattgggtgttaccccagataaaccacacaagaaatcagcccgtattacaggggatgttatgggtaaataccacccacacggagattactctatttatgaagccatggttcggatggcgcaatggtggagttatcgctacatgttagtggatggtcatggaaactttggttctatggacggtgatggcgccgctgcacaacggtatacagaagcccgtatgagtaagattgctcttgaaatgttgcgggatatcaataaaaatacagtagatttcgcagataactatgatgccagcgagcgcgaacctttggtcttacctgcacgtttccctaaccttctggttaatggtgctactggtattgccgttgggatggcaaccaatattcctcctcacaatttgggagaaaccattgatgcagtgaagctgatgatggataatcctgaggtaacgacccgtgaacttatggaagttcttcctggtccagattttccgacaggtgctttggtcatggggaaatcaggtatccacaaagcctatgaaacaggaaaaggctcaattgttcttcgttctcgtacagaaattgaagtaactaagagtggccgtgaacggattgttgttactgagttcccttatatggtcaataaaaccaaggttcacgagcacatcgttcgcttggtgcaagaaaaacggatcgaagggattacagctgtacgtgatgaatcaaaccgtgaaggggttcgttttgtgattgaggtccgccgagatgcttcggctaacgttattttgaacaacctctttaagatgacacaaatgcaaaccaattttggtttcaatatgttggcgatccaaaatggtgttccaaagattctttctcttcgacaaattttaggggcttatattgagcaccagaaagaagtggtgactcgacggaccatctttgataaagaaaaagcggaagcacgtgcccatatcttagaaggtttgctcattgccttggatcacatcgatgaagtgatccggatcatccgcaatagccggacagacgctgaagcacaagctgaattgatggctaaattcaagctctctgaacgtcaaagccaagccattttggacatgcgtcttcgtcgtttgaccggtttggaacgagacaagatccaaagtgaatacgatgatttggttgccttgattgctgatttggctgatattttggcgaaaccagaacgtgtggcgaccatcatcaaggaagaattggaagaagtcaaacgcaagtttggcgatgctcgccgaactgagttgatgatcggagaagtcctttctcttgaagatgaggacttgattgaagaaacagatgtcttgatcaccctttctaacaaaggctacatcaaacgtttggatcaagcggaatttaccgctcaaaaacgtggtggacgtggggtccaaggaactggtgtcaaagatgatgactttgtccgtgaactggtctctacgagcactcatgatcacttgctcttctttaccaataaggggcgtgtctatcgtctgaaaggttatgagattccagaatatggccggacagccaaaggattaccaatcgtcaacctcttaaaattggacgaaggtgagtcgattcaaaccattatcaatgtggagcaagatcgaagtgacgaagcatatctcttctttacgacgcgacaaggtttggtcaagcggaccaatgtagctgaattttcaaatattcgtcagaacggtctgaaagctctgaacctacgtgatgaggatgaattgatcaatgtcttccttacagatggcaatactgatgtcattattggtaccaaatatggatattcagtccgctttaatgaggcagtagttcggaatatgggacgttctgctacaggtgtacgtggtgtgaatctccgtgatggagacaaggttgttggggcaagtgttatcaccgaccaggacgaagtattggtcattactgaaaaagggtatggtaagcgtacaatggctagcgaatacccaaccaaaggccgtggcggtaaaggaatcaagacagccaatatcacagagaaaaatggtcctttagctggtcttttaaccgttaaaggagatgaagatctgatgatcattactgatacaggagtcatgatccgtacaagtgttgggaatatctctcaaactggtcgttcaacacagggtgtgaaagtcatgagactggatcaggatgcgaaaattgtgacctttacaacagtccaacccgaagaaaaagatgaagaagtagtggaagaaaacgaatagataaggggacagcatgtcacgcaaaagaaaaaagaaaaagagtttacgcaatactcttatcaacatcgttgcaacacttttgattattctctcgcttctcttgattttcaatgctccgatccgaaacatgattatggtttggcataccaaccaataccaggttagcaaggtcgataaaaaaaccattgataagaataaagaagtgaagacgagctttgatttccaacatgtccagtcactctcgacggaagccgtcatcaatgcccaatggcaagctcaaaagctaccagtaattggggggatttcgattcctgaattgaacatgaaccttccgatctttaaggggcttgaaaatgtagccctatactacggagcagggaccatgaaggaaaaccaagtcatggggcaaggcaattattctcttgctagtcaccacgtgtttggtctaactggagcaaatgccatgttattctcaccattagagaaagccaaggcgggaatgaagatttacatcacggacaaagaaaaaatctatacttatgtcatctcgtctgttgagacagtgactccagaccgtgtagatgtgattcaagatcgtgaaggcgtcaatgagatcaccttggtgacctgtgaggatgctgcagcgacttaccgtacgattgtaaaagggaatttggaaacttctgttgactatgacaaggctccaaaagacatcctggattcattcagcaagacttataatcaaatgcaactttaagaaaataaagcccatggcagagatgccagggctttttctatgtaggaagcaaaactaggagaaattcttgtaaaattgtaagagattggtaatattatgtaaggaatttgtcataacattaagggaaaatcagtatataataagaggagaaagagtatgataaggaggtagaatagtgacgaaagagcgaatttatcatctcttacatcatttctacaatctcttagtaaatgattttccacgaaatggtttaattacgaaaggaatctacgaagtagagcaagtctaccaagctttagaggccatacctcagagccaggagtacttgattcgctgtgaaattcaacagtttttaaaggaacttgaacaagttcaaacaggttaccaaatccgctttaataaagatgaagtcttagtgttagatgacttgaaacaagaaattgcctgtaaataatgaaaggttgtcgttttctccatttattgcgaattaataagtgaggaggaaattatgtacgacatatcatttattgaaccatctttgcttcctagagaacgtttggtttctgaaggagtggataagctgagtcatcaagaattgttatccattctcttacggacaggcaataagaaaaaaagtgtttatgagattgcacaaggtcttttgagctcagttaatagtttaaaggagttaagtcaattaaccctagaggagctacaggaaatctctggcattggccgggtgaaggccatcgaacttcaggctgtgattgagtttggacgaaggattcataaagacgaattgatgagttccgaacagatcatgagcagtcagaaattggcacataaaattcaacaggaaatcggccataagaaacaggaacacctggttgccctctatttgaatacgcagaatgaaattattcatcaacagaccatttttattggaaccgtgaatcgaagtattgcggagccacgtgaaatcctgcattatgcactaaagcacatggcaacctctatcatcttggctcacaatcatccatctggtgccgtatttccaagtaaaaatgatgatgaagtaacacatcgagtcttagaggcctgtgaagtgatgggtttaaccctattagatcacttgattgtatctgaagaaaactattatagttaccgtgaagagacagattatttggtataaaaaagagagtgggacagaaatcagtaattcgttagaattcgatttcgtcgtcccacctccgcacagttgagtaggactgtaaaagctgatgaaatcagcgtagtagagcccactcaaccactgcgtcttgctcgacaatccaaaaataattgagaggctaggacttttgtcccagcctcttttcttgttaatgtataaatctttattcttcgttttttcgcatgaaataaaggagtgtttgcaattcactggtgagatcgacatattggacgacgacgtctttaggaactgtcagatggaccggagaaaagcttagaattcctttgacaccggcatctactaaaagactagccacttcctgcgctttaatacttgggacagttaaaattgctgtttgaatgccttcttttttgagattctctttgatcgtagaaatcccataaatggggatcccatccttacttttggtattaatcagttcatgatcatctagatcaaatgccatgacaattttcatcttattgcgttcatggaagcgatagttgagaagcgcacttcccatatttccgatccccacaatagcgacattggtaatggcattatcatttaagagatcggcaaagaagttcatcagtttttttacgtcataaccaaatccccgtcttcctaattcaccaaaataagaaaaatctcggcgaacggtagcagagtcaatcccaattgcatcagcaatttgctttgaattggcgcgctctattttttcagagttaaagcgtttaaaaatgcggtagtagagcgataagcgttttgctgttgcgcgtggaattggagtatttttatcatgtttcacaatatcacaacctttccctcttattgtataggaagattgtgaaaaaatcaactatctagaatcgtttttcaaaaatattttcgtctaaagaaaaagctgatggcgatgggagagttccatcagcatcagcttagttttcagcttgttctacctttttcagataagcatagagcccatcgacccgtcctgtataggggagcttttcccccttgtattcaatggatacgattgagtaagagtcaggcagggttacacagcctgaaaaagctaggatacaggctgcaaggtcaggataagtagtcgttcgttctacttggtaagcatcgatataagttaaggttaccatattagacctctgttttgttgaaaatttctctttcgacaagactatccattaggaaatagaatttttgttggatgatatcattctctggatttttaaagatattaaccaggcgaagtccagacttgtcagtaatattgatcttaaaacctgtcaaatctttattgaaaatgattttaagtaggaagccttcgccgctatttggaacgacttcgagcaaacgatttaactcgtaatttccaacttttgtaacagcgaatgtattgtcacgtaaggtatattttttaacatttgggtgtagactataggtatatttgcagtctttcaatgaaacacttgtttcaaaagccatattgttctcctatgataaaatttctttaagttttgagaggaagtcttgaacctcctctacggtattgagttctgaaaaactaattcgaagggattcttttaggcgtgagctatcttttccatagagtgcctcaaggacatggctgggttgaactgtaccggcggtacaagcagaacctgtagagacagaaattccagcaagatcgagtcgcatcaataatacatcattttggacacccggaaagccaaggttccaaacaaatggaagatgatcgtcattcgcatttacgtagtagtcgtagtctgttaaaccattaactagttcttggccaagtttttgaacctggttgaaattttcttcttgatgaagtgtagcttgctgaagcgcggttgccatcccgacaatagaaatgagattttccgtactggctctcatcttactttcctgatccccaccatgtaaaagattatcaaaatctggggaggttgcataaaggaaaccgacgccctttggtccatggaatttgtgggcagaagcactgagaaaatcaattcccaactcttcaggatagacagggacctttccgattgcttggacagcatcaacgtgaaaggcagctggatgatcttttaagagttctccgatttctttaatcggaagaagatcgcctgtctcgttattggcaaacatggtagagacaagaatggtatccggtctaagagccgccttgatatcactagccttaatgcgtccatctcttggttggacgatcgtaacttcaaatccgaaacgttctacaagatattcgatgggttcaagaaccgcatggtgttccaaagcggtcgtaatgatgtgtttgccatctgcttggtgtttcaagcagtagccttttataacggtattattactttctgatccacctgaagtgaagaaaatacgatttggaagagtatggagagactgagcaatttgctcgcgagattctcggagaagtttactagccatccgtccatgagcatgaaggctcgatggatttccaaaagtggtcttcatagtttcagacattttatcaatgacttcaggtagaaggggagttgttgcggcattatcaaaatatatcacattaagaccttatttcttatggtaggcaaatagaggactaacaggttttctttcttgaatgcgaacaatagcttcagcgatcagttcgctagctgtcagatagttaatattttttggtgttggtccatttggagcaacagaatcggttactaagatttctttgatcggagcttggtctaataattcaacagctccttttacaaataaaccatggcttgatacagcataaatttcagtagcaccttcgcgttcgacgattttcgcagcttctgagaatgtcttaccagtattgaggatatcgtcaatcaagatcgctttcttatctttgacatccccgataatatagccataatcacggtttgcatcatcttgctcgtaatcaatgatcgcaatcggtgcatcaagatattccgctaaactacgagcccgtttgacacctgaatttttaggactgacgacgacgacatcaggaccagttagacctttgttgatgtagtgctctgcaaaaagtggaatggtaaagaggttatccacggcaatatcgaagaaaccttgaacctgcactgcatggagatccagtgtgacgacacgatccaccccagctttgaccaacatgtttgcgacgagtttagcagtgattggttcacgaggagcagcagtccggtcttggcgagcataaccgaagtaaggcatgaccacattgacagtatttgcgctggcccgttggcaagcatctaccataattaacagttccatcaagtgattgttgacagggaaactggttgattgaatgatataaatatcatatccacgaacactttcctcaatattgacttggatttcaccatctgagaattgacgggatgaaattttcccaagtggaaccccagcatgatccgcgattttttgcgcaatctctggatttgaattgagagagaagagcttcatattttttttatctgacatgtgattccaacctcatttagatttttgatcttagcactattttagcaaaaatttgcgataatttcagctattttacaatctttccgccaatcttgcgattttattttttgcagctttgtagacgattccatgctctttgatgaactgatggaaattttcttcctgctcagcggtttcgacctcgatttctaattcataatcttcagtgtctagatagagactgtggtctagtgccaccaatcctgcagctgtttctttttcgaatcgttctgttgtaaggcttccccagacagcgagttgctcaacagagatttctttagagattaagaggtttttgatttctccgtcaggaaactgttggtgttgaaggatcgcctcggtttcttctgggctgaggttttgattgtactcgaaatggccaactgcctcagggactttgagagtcaactcagcttgatctgtgaaagtacgcacccgcaaggccattttttccttacggatgagctggtcgggggtatcgatatagtgattggtttggacaaccaattctgtatcatcaaaaagtggaaggagggattggtattcctccttgtctagcaaggttttgtattcaatttctaaatggttcattttgtagtcctttgctttttttcgaaagcgattcatgatataataagagatgtgtttattgtatacaaaaatggttcagattacaaggtggtaggatggcaattgattgggaaaacttcttagatccgtatatccaagcagttggggaattaaaaatcaaactgcgtgggattcgtaagcaatatcgtaagcaacaaaagcattctccaatcgagtttgtcacaggtcgtgttaagccgattgagagtatccgcgaaaagatgatccgaagaaatatttctgaagaaaatttggctcaggatatgcaagatattgctggtcttcgtatcatggtccagttcgtagatgacgtcgaagaaatcctagaggttctgagacaacggcaggatatgcgcgtggtccaagagcgagactacatccgccacaagaaatcaagtggctaccggagttaccacgtcgtggtcgagtatccggtcgatactattgatggaaatgaaacgatcttagcagagattcaaattcggaccttgtccatgaatttttgggcaaccattgaacactcgctcaattataaatataaaggagactttccagacgagatcaaaaaacgcttagagacgacagcaaacctggcctatctcttggatgaagagatgggggcaattcgggatgcgattcaggaggctcaagccctgtttgatccacttcatcgtaagttaaatgatggcgttggaaatagtgatgacacagatgaagactacaggtaaaaaagtatccattattcgcaatcgcaagcgtcaaagtgaagaggtttttcagcagttgcgctacaagcttcggaaaaataattttattttgacggagaagcacccggatattgtgatttcaattggtggcgatgggatgttgctatcagcctttcacaagtatgaacaccagttggatcgggtgcgatttgttggcgtccataccggacacttaggattctatacggattacttagacagtgaaatcgataagctggttgagaacttaaaatatgatacaggcgctaaggtttcctaccctattttgaatgtcaagattactttcgaaaatggggaaacccgtaccatgagagcgttgaacgaagcaacgattaagagaagcgaccggaccatggttgctgatctcacgattaatggagtggattttgagcgcttcagaggagacgggattaccgtttcgactcctacaggaagtacggcttacaacaaatccttgggaggagcagtccttcacccaactattgaggcgctgcagattgctgagatcgccagtctaaacaatcgtgtctatcgtaccttgggttcttctgtcattgtccctaaaaaggataagatcgagattacaccgacaagacctggcttccacattatctctgtcgacaattcaacctattcttaccgtaatattgcaaaggtagaatatcagattgacaaccataagattaattttgtggcaagttccagtcacaccagcttctggaatcgggtcaaggatgcctttatcggagatgatagagaatgagatttgaattcattgtcgatgagcatgtcaagatcaagaccttcctgaaaaagcacgaggtttctaagggtctcttagcaaagattaagtttcgtggtggccagatccttgtcaatggacgtccggagaatgcgatttatttgttggatattggggatcgcttggtcattgatattccagcagaagaagggttcgaaaccctaaaacccatggatcggcctttggatattttgtttgaagatgatcattttttggtcttaaacaaaccctttgggattgcttctattccaagtgcgattcattctaataccttagccaattttgtaaaaggctattatgtgaaacagggctacgagaaccagcaggttcacattgtcactcgcctggacaaggatactagtggcgtcatgctttttgccaaacatggctatgcccatgcccgcttggataagcaattgcagtctaaaacgattcagaaacgctattatgccttggtcaagggatctgggaagcttgatcctgtcggagagattattgctccgattgcgcgtgatgaagagtcgatcataacccgcaaagtagctaaaggtggcaagtatgctcatacaagctaccaggttgttcaatcttttggtgatattcacctagtggatattcagttacacacaggtcgaacccaccagatccgcgttcatttttcccatattggttttccgctcttgggagatgatctctatggcggaagtttagaagacggcattgagcgccaagcccttcattgtcatcgtctatcctattatcatccatttctagaggaagaattggtcatagaaagtccactgcctccagatttccaagctgtattaacacagcttcaaactagttattaattattaaaaggagtaaaactcatggaagttttcgaaaatctcaaagccaacctcgttggtaagaatgcacgtattgtattaccagaaggtgaagaacctcgtatcctccaagcgacaaaacgcattgtgaacgagacagaagtaacccctgtcttgcttggtaatccagataaaattcggatttatcttgaaatcgaaggggttttggatggatatgaagtcatcgatcctcattcttatccaggttttgaagaaatggtagcttccttagtagaacgtcgtaagggcaaaatgacagaagaagaagcgcgtcaagttttgaaagacgacgttaactattttggtgtcatgttggtgcacatgggaattgttgatgggatggtatctggtgcgattcactcaacagccgcaactgttcgtccggctcttcaaattatcaaaactcgtccaaatgtaaaacggacttcaggggctttccttatggttcgtggatctgaacgctacttgtttggggactgtgccatcaatatcaatccagatgctgaaggattagccgaaattgccatcaactcagctattaccgccaagatgtttggcattgatccaaaaattgctatgttgagctattcaacaaaaggatctggtttcggtgaaagtgttgataaggttgtcgaagcgactaagcttgctcatgaacttcgtccagaccttgaaattgacggggaattgcaatttgacgcagcctttgtccctgcgactgcagccttgaaggctccaggaagcaaggtagcaggtcaagccaatgtctttatcttccctggtattgaagcaggtaacattggatacaagatggcagaacgtcttggtggctttgcagcggtaggtccagtattgcaagggttgaacaaaccagtcaatgacctctctcgtggatgtaatgcagatgacgtctataaattaaccttgattacggctgctcaagctgtggagcaataagaaataaatttagagcgtgggacagaaattggtaattcgttagaattcgatttcgtcgtcccacctccgcacagttgagtagggctgtaaaagctgatgaaatcagcgtagtagaacccactcagccactgcgtcttgctcgacaatccaaaaataattgagaggctaggacttttgtcccagcctctttttctttataaaatcagaatttctatactctaactcattctgtggtatactaggaatatgttagatgtaaaagattacgggattaccatgtgggaggaggaaaaaattgcttccttccgagaaaagttattagcctggtatgatgcccataaacgggatcttccctggagaaggacccaggatccttataaaatttggatctcagaaattatgctccagcagacacgtgtcgatacggtgattccttattatgaacgttttttagactggtttccgacggtcgctgatttggctcaagcccctgaagaaaaactcttaaaagcttgggaaggcttggggtattactcacgtgtccgcaatatgcagaaagctgcccagcagataatggaaaatcacggaggagtgtttccatcaagttatgaggaaatatctaaactcaagggaattgggccttatacagctggtgccattgctagtattgcctttggattaccagagccagcagtggatggcaatgtcatgcgtgttctagctcgcttgtttgaggtggactacgatatcggagttccaaccaatcgcaagatttttcaagccatgatggaaatcttgatcgatccggcccggccgggtgatttcaatcaggccttgatggatttgggctccgatattgagtccccagtcaatccacgtccggaagagagtcctgttaaggaatttagcgcggcctaccaacatgggaccatggatcgttatcccattaaggctcctaaaaagaaaccggtacctgtctatctaacagcctttattatcaaggatagtcaaggacgctacttgctggagaaaaatgagcgagatgggcttttatcaggtttctggcatttccccttgatcgaagtggatggcctatctgagaacctaggtcaattatctctattggatgggaagggggaagcagagagtaacccagaaattatttcttttgaacaggactatgacttggccattgattggcaagacagatcgtatcctatcgttcagcatatcttttcgcatcgcaagtggcaggttcagattcgatacggcctagtaaaagaaggagagcagccagcaagtgaatcgacggtttggataacaccagaagaattttccaattatccttttgctaaagctcagcagaagatttggacgactttttcggaaaatgaaaaatagctagagactgatctctagctatttttttataaatgagcgaatgctttgatttcttcttcggacatggatgagtcgcaacgaacagtgacttcaccggattcgacatgtaaaaatcctgggacagttgggataccgtaggttgagcggaaggcttgtaacgcatctagctgacttggttcttcgctattgataaaatagatatgagcttttgtttcagctacgacagttgctaacttagcagcaaacttccggcagtaaggacaagtcttgcgtccgataaagaaggtcgatgtttctttttgatcgatcgcttcttgcgcacgcgcgacagttgtgacttcaagatctttaatatcttctaaaaattgttccatgagattacctcgctttcttctatgtctagtatgccatattttctataaaatcgctggtatttgctacgaaagaaagagagattgggacagaaatcggttatttgttagaattcgatttcgtcacacctccgcacagttgagtagggctgtaaaagctgatgaaatcagcgtagtagagtccactcaaccactgcgtcttgctcgacaatccaaaaataattgagaggctaggacttttgtcccagcctcgtgttttagcctacaaaagcattgatttctgcttcgatgttcgcaattttttctttagcatctgcttcagattcaccaactgtagcgatgtagaatttgatttttggttctgtacctgaaggacgaacggcaaaccatgaatcatcagccaagatgtatttaagaacgttacttggaggggttgtcaatttttcaacgccgtcagcagtagtagctgtttgttccaagaagtcttctgtcttagcaatgtctgtgttgttgaattgtttaggagcattgccacggaatttatccatgattttcttgatttcagcagctccgtcaacacctgaaagggtaacagagatggttttttctgcgaagtaaccgtattgtttgtagatttcttcgataccatctgccaaagtcataccacgtgagcggtagtaagctgcgatttcagcaacgataagaacagcttggatagcgtctttgtcacgtacgaatggtttgatgaggtaaccgaagctttcttcgaaaccaagcatgtaagtgtggttgtgttgtgtttcaaattcatgaatcttttcaccgataaatttgaaaccagtcaagacgttaaacattgttgcgccgtagctttctgcaatcttagttaccaactcagttgatacgatggatttacagagcgcagcattggcaggaagtgtaccagctgttttgtgagcttcaagaatgtatttagcaatgatcgctccgatttggttaccagaaaggttgaggtaagaaccatctggttggcggatttcaacaccaaggcggtcagcatctgggtcagttgcaaccaatacatcagcgtctactttgcggccaagttcttcagcaagagcaaaggcagcttggttttcagggtttggagatttaacagttgagaagtcagcatctggaacagcttgagcttcaacaacttgaacagcttcaaatccagcttgggcaagagcacgacgagccaacatttcaccagtaccatgaagtggagtgtagacaatcttcatgtcgcgtccgtattcattaatcaagtcttggttgatgtttacgcctttcacttctttcaagtattcagcgtcgacattttcaccgataacttcgatgagaccgctagccttgctttcctcaaggtcagctaattgtacagtgaaaggattttcgatagcacggatgtaatctgtcaatgcatcagcatctgctggaggcatttgtccaccgtcttcaccgtataccttatatccgttaaatggagcagggttgtggctagcggttaccatgatcccagcaaatgtgtgaagatgacgaacagcaaatgacaattctggtgttggacgtaggctttcaaatacataagatttgattccgtgtgcagctaaaacttgagcagattcaaaagcaaactcaggagagaagtgacggctatcgtaagcgatcgcaactccgcgtttcttcgcttcctcaccttttgagtcgatcaattgggccaatccttcagttgcttggcgaacaacatagatattaatacggttggtaccagcaccgattaatccacgcataccagctgtaccgaattctaggttggtatagaaggcatcttcttttgttttttcatccattgcgaccaactcatcacgaaggtaagctggtaattcagcaaagttgagccatttttggtagttttcttgataggtcatgcaagcgtctcctttttgcttataatttaatcgcttacattatagcaaattttttcagaaaattctagcgataattgtaaatcttttcaaaaaaatagagctaattcaccatcaaaaaaagccaagataaattggtcttggcttgaaaggttattttaatttttcaagagatggaacgactgcactggtaatgagtactgtcgcaatgacttcgatgagtgagttagtagagacaatcaagccaaggaaatgttgaatcccccctccaaaactgttgccaaagaagaagtaaatcccgcttaaaacgaaaacagtattggtcatagagccgacaattccagcgatcataagtcctgtacgattgcgaatccagcgatagacgaagtaaggggttaccccaatgagaatccgagggactatggcaatgataagggagtagagattcccgtgagggacaaagggactaaagagatagctggctggtgttataaccagggtattcatggtgaggctaaagagtcccatgaggagtcctagaattgctccagttcgaggtccgtagatgatagaagcgatcacgacaggaatatgaaccaaggttggttgaattcctgatggaacaaattgcaaaacgaaggacgtcacaaagtgaatggtgatcatcaccgcaaaaaagatggcaattcgtgaaatagaagatgattttctcataaacaattctccttaacagtttctacaatagtttctacaggcgctagagctccagcacctttgtccccacaagcaagaacagcatcacgaggttggataatctggtaaccatagtcttgtaagagctttagatttcgttgggtagcgggatgttctaacatttttgtattcatagcaggggccagtaattttttagtcctttgaggcaaggctagagctgtgcttgtgaccatattatctgccagtcccatagccaatttagcaatggtattggcactggccggcgctacaagaaagaggtcagtttctttcccaatgtcgatgtgctcgatccgctgtggatcgtcttcaatcataacatcaagccccacttgattttttgaaagaacttgcaaggttaaaggggtgataaatttttgggctgaaggagtcatgaggaccttcacttcaaatcccaatttggttagttggctggtaatatcagcagccttataggcggaaatactaccggtaaccgctaaagtaatgtgtgtcatgtgttcctttttatttgatataacgtaggatggcctctgcgatttctgttttcgtagaagcttctaggacctgatcatctgtcactagataggcttgatgctgaccgttctgaatcttggtcagatcattggcaacgatcatgctggcatgatttttaaccaagctttcacgcgctacatggatcaactcttcagaagaaacgtcgactaaaagcttaaagccgatcagttgaatagcagggttccattctttgacgagcgagataatcttgggatttttctttagaaagagcacttggtattcttctttggaagaaattttcggttcctgattttcgcgatggataaagctatgaaggtcttgagccttctcaacttcctcaaggcctgtcatgtaaacaggtgtgtagtctgagactgccatagcgtgaatcaaaacctgatgatgagggacttccgttttcatttgtgcgagtagttcttcgacattcttgaccaatagaagacgtaggtgtgggtgaggatcgggtttaagcgcagtaggcgttgtgatcaaggtcacctgatgtccctttgtaagagccatttctgcaaggattttccctaggctcccggtggaatgattggtgatcgaacgaacactatcaatggcttcgctcgtcccgcctgatgtaattaaaatatgcatatgcttattttacactaaaaagatacgtaagtaaagttctgaagctattaggattagctatgtgtagccataaaatttagataaaaaacgaacgttcgattcaaaaggtggaaaaaccatgtcattttcgcgaattttaggtataatagatctatcaaatataaaggagtcccttatgaaaacagatatcgaaattgctcaaagcattgaactccaaccgattgtggacgttgttaagaaaatcggtttggtagacgatgatcttgaattgtatggaaaatacaaggcgaaattgagctttgataagattcgtgaagttgagaaaaatccagtaggaaaacttatcttagtcactgcgatcaacccaactccagctggagaagggaaatcaaccattaccattggtctagcagatgctttgaataaaatcggtaaaaaaaccatgattgccattcgcgaaccttctttaggtccagttatggggattaaaggtggtgctgctggtggtggctatgcccaagttctaccgatggaagacatcaaccttcatttcacaggggatatgcatgcgatcacaacggctaataacgctctctcagcattgattgataatcatttgcaccaaggaaatgagctaggaattgaccaacgtcggattatctggaaacgggtagtggacttgaatgaccgcgctcttcgtcatgtttctgtcggtcttggcggtcctttaaatgggattccgcgtgaagacggttttgatattaccgttgcttctgagatcatggccatcctttgcttggcgacagatattgaagatttgaaacgtcgtttggccaacattgtaattggttaccgttatgatcgtagtccagtttatgtccgtgatttggaagtggaaggggctcttgccttgatcctcaaagatgcgattaagccaaacctggttcaaaccatctatggaacgcctgcctttgttcacggtggtccatttgccaatattgcccatggatgtaactctgtattagcaacgacgacagctctgcatttagctgattatacgattacagaagcaggttttggggctgaccttggcgctgaaaaattccttgatattaaaactccaaacttgcctacatcaccagatgcagttgtgattgtagcgactctccgtgctcttaagatgaacggcggagtagctaaggatgcattgactgaagaaaatgtagaagctgttcgtgctggttttgccaacttgaaacgccacgttgaaaacatccgtaagtttggcattcctgcagtggttgccatcaatgaatttatcaccgatacagaagcagaaattgctgctttgaaagaattgtgtgctgaaattgatgttccagttgaacttgcgagtgtatgggcgaatggtgcggacggtggagttgaacttgctgaaaccttggttaagaccattgaaacaagtccagctaactacacacgcttgtatgataacaacctttctgttgaagaaaagattgaaaagattgttacagaaatttaccgcggtacgaaggtgaattttgagaagaaagccaagacacaaattgcccaaatcgtgaaaaatggttgggataagttgccaatctgtatggccaaaacacaatatagcttttctgataatccaaatgccttgggagctcctgaaaactttgaaatcactatccgtgaagtggttccaaaattgggagcaggctttattgtcgctttgactggggatgtcatgaccatgcctggtttaccaaaacgtccagctgctttgaatatggatgtggctgctgatggaacagccatcggtttgttctaatagctagatatctaaaaacaacttctgttcaaatgagcagaagttgttttggtcttgttaatcaatcattattcagtaaggagttggtacctgatttttcgatagattatgatgagctgtagggtcatgggaatccagataaggggttcgcagagaatgacccccatgtagccggtgtgaggaataatccacagaacgaagaaaatttttccaaacaattcaataaaactggatgtgagtggggttaattttttacccattccctgtagggcatttctcaggatgatgagactcgccaaaataggataaaagcaagagctgatctggagataaagactggcatttgcaatgagatcaggatttgtcgagccggaaataaagctggttaaagacggacttgtgaagaatagaagagcagcaaccaagacagaccaaacccaagaaagaaggttggcaatggtaacgccttttttgatccgctggaattgctctgcgccaaaattctgcgagataaaggttgtgatacttgaggcgatagctgtaatcggtaaaacggcaaaggacatgatacgacgggctgcgacctgtgcactgataatggttgttccaagctgattaatagcggattggaggataaccgttccaatcgaaacgatggaagtcatgaggcccatggcaaggccctgacttagcagatcctgataaagctccttttcccaaacaaaatccttgcgatgcgggagcagaaaagggaccttcttacgaatatagagaagacaaagaagggccgaaataccctgggcaataatggtcgcaattccagcggattggactccgagatggagttgggtaataaaatatagatcgagaagaatattgagaatggcagcgataatcaggaagtagagtgccgctaagctatcgccaaccgctctaagaagtccagcgcaaagattataggcaaaggtcacagccacaccattgacaatagtggagatatagagataagactgagacacaattgctgatggggtccctaaaaattggagcaggggaaaaagtccgacagcaccaatgaagatcacgaagagactgagaatgcaaccaataatagcagttgcggcgactgattttcgtaattggtcttcgtttttggctccataatttctcgcgataataatccccatcccatttccaacaccgacagcaaatccaacaatcaaatcaaaaatagcagaggttgccccaatggcggccaaagatttttgacctaaaaaacgccctacaatcatgacatctgaggtattgtagagttgttggaagatattggataaaagaataggaaaggcaaaactcaaaagagcgggtaaaataggaccatttatgagatctacacgttgaattcttttcatagtgtcattataccaacttcagtaaccagcgacaagcatcggtagttgaatccccttacattttttggtataatcagggcagaaaaggaggcttttatgagcttaaccagccaattaatcacggaaacgttcccagatctggacaaggtcgagaggctgaatatcgaggcatttccagaagaagagcgagttcctttgtcggaatacctgagttatacggacaatgacgatgctaatttttttgctttttataacgaagaagaatttgtaggatttgctttttctatctataatcagaaagttttttatgttagcttctttgccattatgccccacctacgtagccacggttatggtcaagaaatcattgaaaaattggtagaattttaccaaagaaccatgattcttgaagtggaacgtttagatgaagaatgtgacaatctagagcaacgtcagtctcggatggatttctataagcgtaatggttttaaaactgccaatgcttttttagaatacgaaggactgagctttgaaattctctatcggggtgatcactttgacgaagaggcttatcgcgatattttccgtaaactgcaggaagaaaattatttcgatttccgcattaaatatagacgctttagtgaccactagacaagaaagaggctgggacaaaagtcctagcctctcaattatttttggattgtcgagcaagacgcagtggttgagtgggctctactacgctgatttcatcagcttttacagccctactcaactgtgcggaggtgggacgacaaaatcgaattctaacgaattaccgatttctgtcccactctcttttagtttagatatttaatgaagaactcaatcagtttcatgatttgtgtaaagaaccaaggcagaaatagaaaagctaggaaggtaacatgccatttccaataaagtgaaaccaagccaacggtttctcgaatccaagcggatgggagatagtaaaaggctgttcttgaaccgatacttcgaccaggtattttcaatcgtctcataaagacacctgcacggagcgcgtgaaatgaattggttactacaaggactcgcttgccaagcccctctttttcaaggagacgcttgctaaaggtcaggttttcaaaagtagtacgagagcgattctcgatgagaatggcgtcctctggaaccccatgttccattaagtatctggccatagcttccgcctcagcgatcagctcatctgacccttgaccaccagaaacaatcagctttggtcgtccctcgaactgctcatagatggactttcctttctcaagacgttgggccaagagtgggggaaccttgtctccgatcaaacctgagccaaggatgatgatggcgtctggctctttgcgaactggaaagagattgcaaaaagtcccataggatacataagagaggtagagaaaagtcatgtaaaacagggcgaagtcagtcagataaatgaggatgtcattccctgggaaatagggtagaaaatgtagtgccaaagctccgataataaacagcccatagagcagagagaggaggttggccagcctttttccttcaaaagccatcatttgacgtccgttaaaaaggagaaagatagatgagaaaataatgctgagaaaaacgaggatggaaatcaccacaaagacaatcattgcaatttgttgattaaaccataactcagttcgaacgactagtaaaaatgcagaaatcagtagaaaaagccccaagtttatcgaaaagagataagcattgaaaagccttctgcgatcactcataaagaacaataaaaagttaagagctggaaataaccagaatagatatagatacatgttttgcccctcgtaaaatcttacatccattgtaccataatgactgataaaaatagcggattgttcatacaaataagttgcattcttcaaatgaatttgataaagttaagattatcgttttttaaggagatcgtatgttacgaaaaggttccctgacaggtttattactgtttggtattttttttggtgctggaaacctgattttcccaccggctcttggtgctttatcgggtaatcaattttggccagctattgctgggtttgtcctttcaggagtgggaattgccattgtgaccttgattatcgggacacttaatcccaaaggatatattgatgagatttctcgtaagatttcacctgttttcgcgattgtatacttagttgcgctttatctttcgattggtcctttctttgctattccaagaacggcgacggtatctttcgaagtggggatagcccccttattaggtggaatgaatgccagtttagcacttttcatttttaccctggtctactttttgctagcctttctaattgctttgaatccatctaagattctagatcggatcggtcgtatattgaccccgatctttgcgattctcattttgatcttggtcgttcttggggctctgaaatacagtggacatgctccaatggtggccacaaaagcctatcaggcatctgcctttggacaaggatttttagaggggtacaataccttggatgccttggcctctgttgcctttagtgtgatcgcagtgacgaccttgaatcaacttggattttcaagtaagagagaatacatcaagactatttggttggttggaattgttgtagcccttggttttagtgtgctgtatatcggtttaggatatctggggaatcattttcctattccagcttctgttatggcatctgatagcaataaaggggtgtatgtattatcagaagcgaccaaagcgatctttggtccgactgctcagattttcctagcaggaatggtgacggtaacttgctttaccacaactgctggtttaatcgtctctaccagtgaattcttccatagcaccttccctaaggtttcttacaaggtctatgcaagtgtcttcactctgattggttttgcgattgccaaccttggcttgaatgccattattgccttttcattgccagtcttgatgattctttacccaatcaccattaccattgtattgattgtgatagtgaataaatttgtggctctttcaaaaccagggatgcaattgactattttcttggccagcttggtctctcttgcaagtgttctggcaaatacctttaaaatttcgttagtagaaaaggggattgctttgcttccatttgcggctcaatctcttccatggttagtgccagtagtcattgggattcttttatcgctcgtattaccaaataaacaaacagcagaagaataagttatattagaaactctaaagttttgtgctttagaaatagattgaagataatatcctcttagaaactttccttaggtgagtacggacgtcagcgaacttcatagaagttccatgacttagttttgaatctaaggtttcaaaactcccgagtgctagaaacatcactgtttctagcacttttctcacggcggaaagtttcaatgtatacttgaatgtgccttatatattcttttagtttttcaccacaacttagactctaaagttattggctttagggtctttcttttgaaactagtacccaaatccaaactttagtaaaaaaacgtagcagaaatttttcttttttgtcagtcaatgctatactgaatgtagcatatcaatatacggagtgaactatgaatccaatcattttttcattgacagtttttcttgcgggtattctgtctttcttttctccctgtgtctttcctttgctaccggtttatattggaatcttgctaggaagtgatcaggaaaaggctatccgattgttcgggaaaaaaattcgctggcatggcttgttgaaaaccctttgttttattgccggtatttctgttattttcctcctcattggttttggagcgggtttgctaggaaagatcatgtacaccaattggttccgttatctgatgggagccctcatcattatccttggtcttcatcaaatggaagtctttcattttcatttccttgagaagcaaaaaacaatggattttggagccaacaaacagaagaatgagttgttttcagcttttctccttggtcttggctttagttttggttggacgccttgtatcggccctgtattgggatcagttcttgctctagcagcatcggatgggcaagatgctcttatgggagctatttatctccttgtttataccttgggaatggctcttccgtttttactgttggccttagcatctagtctggtcctaccttactttaatcgtctcaaaccccatttgttgttgctgaagaaaatcggcggagccatcattattctgatgggaattctcttacttttgggacaattgaacagtttgtcatctatcttttcataaaataatccggaggtttaacgcatgatgaaaggttttaaatacgcttgtttctcagtactttctctagctttgctgtcagcttgttccatggatcaatccagcgagagtagtatgggcaatcagccaacaatgaatacaacaacgaataagaatgctttggtaggaaaagacgctagtgactttgaactaaaggatatgaaggggaatacggttaaactttcagactacaaagggaagaaggtttatttgaaattttgggcaacctggtgtggaccttgccggcaaagtatgcctgaattagagaaattggtcaaggatacggatagagactttgaaattctgaccattatggcaccaggactccaaggtgaaaaaactgaggaagaattcgtcaaatggtttgatcaacaagattacaagtccgtaccggtcttgtacaatcaagacggttctgcatttgcagattatcaggttcgctctattcctacagaagtctttatagacagtcgtgggaaaattggacatgtccaattaggggctatttcaaacgacgatgctaagaagattatcaaagagttacaataaaaaaatgaagcacgaagcttcatttttttattagttgcttgcaccagaagttgcatcggcatctccgtgccctccgtcaccatgtcctccagcatcagaagcaccagaagttgcatctgcactaccgtgtccactagcaggagcaaatggaccgcttccgccaactagacgttgtcctgttgtttgtaggtaccagtccaaccatggtttgaagttgaagacaatctcattgataccagcgtatgaaccatcttcatagtacatagcttggtagttgtgagtgttgatcacgccttcaggagatcctggaacaatagtccgaacatagtcttggttaccgttacgaagggtaccaatcacccattccacgtttttcatacgtgctggtggtagggaaccatgaacggttgacatccggcttcctgattgaggtggcacgcgtttggcaaacatggtatcaggatcttgatgggcattgttgtagtagaggaattggttgttatcatcggcataggtcaattcaaatggcatagcctttaagaacatatcaatttggttaacggttagaataccgtggtcgagtttgacataggtatcgccggaaacggcaccagtgatttcagctactttttctacccaatctggatcgtcaggatcgacttcagtaacagttgtagcgattggatgattacaatccaagtcttctggttcaattggttttggttttttcaatttagatacaacctcaacgtatttcataaaattatccaagcaggtttcaaggaatttgacggttccctcgttaatgatattgccgtcttcgtcaaaagcttcttttgcttttccaagaaggaattcatttcctggaagggtataagcattgacacctggggcatcgaggatcttacggaggtgaacttgcgcacgtgaagtcccttgatcatagtaagaagcaccgacgatcataaccggtttgttttcaaatggatgcacctcgaaagagagccattcaagaacagacttgagagcagcagagatcgtatggttgtgctctggagtggcaatgataacaccatctgcacgagtgattttgttatataaaagacgcaattggaaactttcgtcccatttttcatcttggttaaacattggaacttcgtcgatttcaagaacttccaattcaaatttgattttaaattggcggcgaatgaattccaaaagtttacggttatatgattgatcgtagttcgatcctacaagtccaacaaatttcattcttttctgtctcctatcctacaagttttcccagtcaaattcttcagcatctttgcgaagtaattcttgggcgttgcgcaatttgtctgtaattttcacaaacacacggaaatcattgaagacggcatctaatttttgaatgacatctaaatccaccaagtctccattttgatcaaaggcttgcaatgaatgggagagcaagaattcatctggcaagacattcgctttgatttctggagcatttaagatttggcgaagttggagttgggcgcgtgaagatcccaacgtaccgtatgaagccccagtaatcatgactggtttattcaacaatgggaagactccgtatgagagccaagcgagagcactcatcaagaccgctggaatagagtggtcgtattctggagtcccaataatgactccatcagcctcctcaatttttgcaacaatatccaagacagcttcaggcacttgtttgtcggctggtttgttaaagacagggatatctttaatttcgaccaattcgatctcagccttatcagcaaaatgtttttgcatgtattgaagcagttgacggtttgtagaacgtttggagttagtccccacaatcgcaataagttttatcatggaaaattcctttctgataggagaattataaataagattgaagcccacttgtataggcgatcttgcctgattgagaaaccaataaggtatctataccaggaagtgattcaacagtgttgaggatagaagcaggagattccccgaacaggcgggtagtccatatctccccgtctacggatcgatcagatatgatggtgatactggctaaatctgtctcaaccggatagcccgtctcactatcaaagatgtggtgaaacgactggccgtccacttctaaatgacgctcgtagataccagaggtgacaatagatttatccttgacggagaggaccagcaggtgctgacctcttttttcgactggattttgaatgccaatccgccaaggttgttgtttgacggggtgttgaccgacagtgaggatatttcctccaagatcgatcaaggcatctgttactccctggctctttaaaaaggtagcaatgcagtctgcactatagcccttagccaaggctcccaaatcaatcttcattccaggacgcatcagaaagactgtatgattttctgggtcgagctggatttggtgaggatcgatcttggccagggcttgatcaatttctccttgctggggacgtctagcatctgaaaatccaattcgccaggtctgtacaagaggaccaatggcgatgtttaaatggctgtcttgagcttgactatgcaaggtacctaatgcaatcagttcaaaaagatctggatgaacttggacaggagcaagaccagcttggtgattgacctccatgagttcagaacttgcatcattggcactgaagcgatgttcgtaggagcgaagaagttcaaagcagcgggctaagagttcattcgcttgtgggtgacagatcgaaacagtgatggtcgttcccatcaaccgttcggatcgactacttaggtccactaaaaatctatcctttcctattttcacttacctacagtatatcaaaaagatatcgttttcacaatcctttcaagcatattgtttgacattttttgaaacatgtgaagtgtgattttctggaaaattgaaaaaaagatcacaaattctgagcaaaataattgtaaccgatatcatttttatgatatactcaagaagtaaattaaattaaaggtaggatttattctatgagtaaaatcgttgttgtaggggctaaccatgccggaacagcttgtatcaacactatgttagataatttcggaaatgaaaatgaaattgtagtttttgaccaaaactcaaacatttcattccttggatgtgggatggcactttggatcggtgagcaaatcgatggtcctgaaggtcttttctattctgacaaagaaaaattggaagcaaaaggtgcaaaagtctacatgaactctcctgttctttcaattgactatgacaacaaagtggtaacagcggaagttgatgggaaagaacacaaagaatcatacgaaaaattgatttttgcgactggatcaacaccaatcattcctccaattaaaggagttgaaatcgttcctggtaaccgcgaattcaaagcaactcttgaaaatcttcaattcgttaaattgtaccaaaacgctgaagaagtgatcgaaaaattgaaagataacagcaaacacttgaatcgtatcgccgtagttggtggtggttacatcggtgttgaacttgctgaagctttcgaacgtcttggtaaagatgttgtcttggtggatatcgtggacactgttttgaatggttactacgacaaagacttcactgacatcatggcgaaaaacttggaagaccacaacatccgtttggcacttggacaaacggttcaagcggttgaaggagatggtaaggtagaacgccttgtaaccgataaagaaaccttcgatgtagatatggttatcttggctgttggtttccgtcctaatacagctcttgctgatggcaaaatcgaactcttccgcaacggtgccttccttgttgataagaaacaagaaacttcacttccaggtgtgtacgcagttggtgactgtgcgactatcttcgataacgctcgtaacgaaatgagctacatcgctcttgcgtctaatgcggttcgttcaggtattgtcggtgcctacaatgcgactggtcatgaattagaaggaatcggtgttcaaggttctaacggtatctctatctacggccttcacatggtttcaactggtttgactcttgaaaaagcgaaagctgcaggcttcaatgccactgaaactggctttaacgaccttcaaaaacctgaatttatcaaacacgataactatgaggttggtatcaagatcgtctacgataaagacactcgtcaaatccttggagctcaaatggtatcacgtgatagcgctatctcaatggctatccacatgttctcacttgcgattcaagaacacgtgacgattgataagttggctttgacggacttgttcttcttgccacacttcaacaaaccttacaactacatcacaatggcagctttaactgctgaataatgaattaatgaaaaacaaagctagcgctgctagttttgtttttttctgtctttacatgtattcagaggcagtgaaataaggtataatgaataggataagagtttgaaggagttagggaatgtctgaaaaagaagaagccttaaaaaaggaatttcattttgcctctagttcgattgtggcacatattgtcagaggtgtcctggttgggattgttgtaggctgcatcgtctcgagttttcgttttttgatcgaacatatttttcattttgttcaaggcgtttacaaggagatgcctggtcaaccactttatttacttgctatgctattgggttatggggtgatcgtactgattgctggtcgccttattcgcaccaatcgggatatcaagggatcaggaattccgcaagtcgaagcggagcttaagggtctcttggcggtgagctggtgggataccctgtggaagaagtatattttaggtgtcttggccatcggaagtggcttgatgcttggtcgtgaaggtcctagtattcaattaggggcaatgggtggaaaaggagtggcccatcatttgaaggtcagtccggttgaggagcgatctttgattgcaagtggagctgctgctggtcttgcggctgcctttaatgcacctatagcggggctcttatttgtggttgaagaggtctaccatcatttttcacgcttcttttggatttcgaccttggctgctagtttgacggctaattttatttcacttaatgtctttggtcaaacacccgtacttcatatgccgcaaaatattccgccactccatctgtcacagtactggatttatctttttcttggagtctttttaggggcagcaggttatgtctacgaaatagtggtccttaatatcggtcgattgtatcgtttgctagagaagattttccatgttccttctcattattcttctttatttgcctttgtcttgattcttccaatcggctatttccttccacaaattcttggtggtgggaaccaattggttttggatttagctcgagtaccgtatccagtgctgaccattcttctctattttgcgatccgcttcatctggagtatgttaagctatggtagtggattacctggtgggattttcttgcctatactagcattaggatcacttttaggtgccatcgttggaaccttccttcaaaacattggctttatctctcaaaaccagctgcctcttttcattattttaggaatgagtgggtattttggggctatttcaaaagcacctttaacagcgatgatcttagtaacagagatggtcggtgatattcgtagtttaatgcccctaggcatggtgaccttgctggcttatatgatcatggatctcttccatggagcgccagtctatgaagccatgctcgagcaattgttgccggataaggcgcaagaagaaggagagttgactttaattgagatccctgtatcagaaaagattgcaggaaaacaagttcatgaactgcacctccctcaagatatcttgatcaccacgcaaatgcgaagcgggaagagttatacggtcaatggtgcaacccgcttgtatcttggagatagcatctttgtggtggttaaagaatctgaaatcggacgggtcaaggatattcttttgtaaaagacagattctcagaaaagcttttctattattaaattttcagacaattattgaaaaatgagaaaatatctggtagaataagggcaagaacaaatgaggagaagtctttcatgaaaaaatatagtctactcttattgagtgttgctcttttagcagggtgtgcaaattctactagcaaacagtcgaatcaaaagacgcaaaccagctcaacggtgcagttgtcgaaggatgaccagaagaccttggacaatgcgacagctgaatacaaagactttgttgaaatgcaaattgaccaattgctcaaggatacagaaggattccgagctaccctaaaagacggtaatttagaagaagctaaaaagcaataccccttgatccgtatggcctatgaacgttccgaaccgattgctgaaaccttcggggaatcagatgtcaagatcgactaccgtttggtggattatgtggatgaaaataaatcagaagatggctggtcaggtttccaccggattgagcgtatcctttgggaaaacaatactacagatggaacagacaaatacgctgaccaactggtgaacgatattaaggagttgaaagctaaaattgctacagtagaagtaacaccggatatcatgttgaccggagctgttgatttgctcaatgaagtggcaacgcaaaagattacaggtgaagaagaagtcttctctcatacagatctttacgacttccgcgccaatattgaaggggctgaaaagatcttctctctctttaaacctttgattgagaaaaaagattctaaattggttaaaaccttggaagcagaattcaaaaatgtcaatgctctattggacaaacacatgacagatgattcaaactataagtcttacacagacttatccaaggaagataccaaggaattggcagaagctgtgaccaaacttggtgaacctttgtctcaaatgggtgtgattttagatgggaaataagaaaaatggctgacgaaaaatttttagataaaaaaatggaccgtcgtgaatttcttaaaaaagcaggtattggaggggctggtctagcgctgggcctctctggtgcatctgcttttttcgctaatcaagacagttccagcaaaaaagcttatgatggggatgaagacatctccttttatggcaagcaccaagcagggattacgacggccatgcagaaggcttgctacttggttgtgttagatcttcatacgacggacaaaaaagaagttatccagctctttaaagattggactgattatagtagtaaattagtcgaaggagagttggtcaaaaaagatggttccaatgccctcttgcctccaacagatacaggtgaaacagtaggactcaacccctatcgcttgagcctgacttttggggtttcggcttcctttctaaagaaactgggcttggaggccaaacgtccgaaactctttcgtgatttacccccatttccaaaggagcagttgcaggacaaatatacgggtggcgatatcgtcattcaggcctgtgcagatgatgagcaagtagcctttcatgcggtacgaaatctgattcgtaagggtcgcaagaccatcaccatgaagtggagcaaatcaggatttgcagctattggtgaccgaaaagaaacgccgcgcaacctctttggtttcaaggatggaacagcaaatgtcacgactgagaaggattttgacaaggtcgtctggactgacagcaaggactggatgaagggtggttcttatatggctcttcgcctagtgcaaatgcacttggaaacttgggaccgaaccaatttgcaggagcaggaaaatacctttggtcgctacaaggagtccggtgctccatttggtaaaaccaacgaatttgatgaagtagatttatctaaactaccagttgattcacatgtccgtttggccaaagaagtcgatcgaccgattttacgccggtcatattcctattcggatggcatcaatgaacagactgggcaatttgatgctggcttgatctttatcgcctttcaaaaggatccgaacagctttgtcaaaatccaaaccaacttgggcgcagtagacaaaatgaacgagtacatcacccatatcggaagtggactctttgcttgctttgcaggcgttgagaaaggagggtttcttggtcaagcactctttgaataaattcttgatcttgttaggccttcttgccttgttctggactcatccagtagctgcggaatcttatagcgatctctttatcaagatcacagatgcaacaactgctgtagaaaataagaatcaggataaggccaaggaattgatagctgagattcaggctgattttgaatccaaagaccaccatgattccaaggcagggaaaaaagttagccaagccctggctataaaaggggaggcaaccaaagaggatcttaccaagatctcatcagccttgctcgcttttgaaaaagagcaaaatccggtcgatttagaggcggaaaaagacaaactcgtgagtcggctcgcaccttcttttaagaacctacaaaatgccattacagctaaggatctggataaaacccgtcaaacctatgccgatctcaataatacctggacgcgaaacgaagcagtggtaagagatcacagcacagcctactatggcaaaatcgagacggccatttccctcttgcgcagtagtattgaaacagagcctaccgattttaccaacatccagtcctcttatgacgacctcaaaaatgggattgatgcctttgtaaaaggagaggccattagcagtgccagtacggatttgacgctgaacgatgggatcaagcttttggagaaggcgcaaagccaattccaagctggggatgaaaagtctgctgcagcgactatgaagcagttcatcacgatctggccaactatcgaaggggatgttagcacgaccaatcccagtctctacacgcgcgtagaaattgaatccccggtcattatggtcaaggggaaagaaaaggcctatcaagagaaattacaagccttgatcaaggacctgtctgcgatcgatactacagcttcttacaacgcttttgatgccatgttgattcttctgcgtgaaggagtagaagcgctgctgattgtcatggcgcttgtgacgacccttaaggccgctaagatgaggaaaggcctcaaatgggtctacggtggagccattgctggtgttcttgccagtgcagcgatcgctcttgttttgcaagtagcttttccagccgttacttcgggggctaaccgggaaatcattgaaggtggcgttgggattttcgctgtagtcatgatgattctcatcggaatttggctccacagcaagtcctctgtcaaacagtggaatgcctttatggaccgtcaaatgaagaccgtgacggctacaggaagctttgtctcgatgtttgctctcagtttcttagcagtctttcgtgaaggggctgagaccattctcttttatgtcgggatcattccgcggattacaactgcgaatttcttactgggaatcgggcttgctatagctgttctcatcatcattgcagtggcaatgaccaaggctagtcaagctatccaacctcatagaatctttttcattttgacttggttgatttatgccttggccttcaagatgctcggtgtcagtatccacgcccttcagttgaccaatatcctccctagccatttggtcaatggacttccaaccatcgattgggcgggcatctatccaagctgggaagttcttcttcctcaaggtatctttgtggccttgatcgcccttatcacggtgagacagcatggcaaagagtagagcagatgaaatgtccattgttgaacatttggtcgaatttcgaaaacgattgatcgcagtggtcttatgttatattatcgtcttcatcgtagcctttgtatttggtggagaactctaccaagccttgacggctagcctgcatcaaaaactgctggtactgggaccaaatgatatcctctggatctatgtatcgctggctaatctcacagcctttagcctaaccttgccctttattgtctaccagatttggcaatttgtaaggccggctttgaaggagaaggaggcgcgtgcagtctttgcctacatcccagctagctttatttgctttgtgttgggacttgcatttggttatttctttgttagcccagctattttagaggtcttgatgcgcttgggagaagggctgtttgatacccaattgacggcacaaaattatctaaccttcttatggcacaccaccttgcctttaggggtcttgttcgagttaccagttttggtcgcttttctgacctcgattgggctcttgacaccacagtttttaataacctaccgacgatacgcatactttgtcctgctggtcttagccgtcgtgctaacccctgcagactttatcagtgacttggccatgacactccctttgatcctcttatttgaagtcagtgtcgccatcagtaaagtcatctattcaagaaaaaggagaaactaatgggaattttacgtgatattggagcaccaggattgatcatcatcatcctgggcgccctcttgatttttggaccaaaacgcctgccagagttgggtcagtccatcggcaaaatgtttgctgaatttaagactgctgtcaataaaggcagtgaagaagccgatcaagacaccaaagaagctaaagaagaaaaagaataatcagacaattttcaaaattctattgagttcgattgcataaaaaggtataataagacaagtacttgcaatcgacgaaggaggaaaccatgattattacgattttgtcacttattttctattttagctatatcggattcttatgctggttggtcgtaaaaattgtcgaaaaattgttcaatttcttgttgaaccgttaataaagaaacaatccatttcaccccgagtgagtggatttttttcttattcattcagatagagaccctgtggtctctttttgcttatccaatttccctagctagtgactaacttgaacttcaaactgtatttcggtatgatagtaggtaaaggatgactaaatatgtatagctttcataagcttttaatcttatagaaaagggacaaaacacatgcagttttattttatcggcggcttaggtggcaatggcagccatctggctccacttattgaaaaactaggctttcctgtgacctttctagatccttatagggaaatgattcagacagaaaacgatcttcgttcttggtttcaaggtcagatcggccaggcggaagaaatctgtttattggggcattccttgggtggagatttggctcgttatctgtcaagtgaatttcctcagattcgagctctgattctcttggatggtggctatctggatatggaaaagatcctgcctcttgaagaagaactagaaggaacggcgtctttcatgcagcagcaagtctttgcgactttagaagaagccgtgttatccgaacttggtgaggaagcagatcctacgtctatagcgcgaaaagcagtagaggctagctatcgttggaatccattgagtgaacaatatgaattaaatctggatctagaaaaggtcttggccttattgcgtctacggcgtcagatgaggacttaccagattccactggcggacctgcctgtcctctttatcgggcctcgataccaagaagaacctgaatggagaaaagatgctctgaagcaactagatccccagatcaagcaagtcttgctagaaggtttggggcacgaactgtatacagaggcgcctgaaattgtagctagagaagtgaacaattggctccaaaatgttcataaataaaacctgtttctctttttgaagcgggtttttgtcttgtaatttccgaacgttatttcctataaaatcattcccattgcattaggtccgtatctttggtataatctatcaaggaaacgtcaagagacgtagcgatgcgcttgcgcataggtaggtcagtttttagaaaagagatttttcaatctatgttaaatgaatttcctattttcgactatgaagatattcagttgattcccaacaaatgtatcatcaatagccgctcagaagcagacacaaccgtccaatttggtaagcataccttcaagcttccagttgttcctgccaatatgcagacaatcttggatgagaatgtggcagagcagttggcgcgtggtggatacttctacatcatgcaccgttttgatgaagagggtcggattccttttgtcaaacgcatgcatgatcaaggtttgatcgcttccatttcggttggtgttaaggaatacgaatacgactttgtgagtcaattaaaggcagatgcgcctgagtacatcactattgatatcgcacacggtcatgcggatagtgtcattcggatgattcaacacatcaagaaagaattgccagatacctttgtcattgctggaaatgtcggaacacctgaagctgttcgtgaattggaaaatgcgggagctgatgcgactaaggtcggaatcggtcctggtaaggtttgtatcaccaaagtgaagactggatttggtacaggtggttggcaattggctgctcttcgctggtgctcaaaagcagctcgtaagccaatcattgcggatggtggtattcggacccatggcgatattgcaaaatcgattcgtttcggggcgtctatggtcatgatcggttcgctttttgcaggacatattgaaagtcctggtaaaacagtagagattgatggagagtctttcaaagagtactatggatctgcttcagagtaccaaaaaggtgcatataagaacgtcgaaggtaagaagattttattgcctgccaagggtcatttgcaagataccttgacagaaatggaacaagatttgcaaagttcgatctcgtatgcaggaggccggaaattagcagatttgaaacatgttgactatgtgatcgttaagaattctatctggaatggcgatgcacactaattgaattacttatttatttcacgaataggcgtgatgtttctacaaggtgccggaacacctaacaataagtaagtcgggattatttctctttctagagagatttcaaggcttgcttagcaggcctttttgtgttttatgaatgaagtagaggattttttaaaaagtaggaggaagtatgaaattacttgaagaacgcatcttaaaagatggcaatgttttaggtgagaatatcctcaaggtggattcctttttgacccaccaagtggattttaaattgatgaaagaagttggtcagacttttgcggaccggttcaaagatgctggtgtgacgaaagtcgtgaccattgaagcatctgggattgcaccagccctttatgtagccgaagccttggatgttcccatgatctttgctaagaaggcgaaaaacatcacgatgaatgaaggcattttgacggctgaggtttattcctttaccaagcaagtcaccagtaccgtttcgattgctggtaaattcttggatccatcagataaggttttgatcattgacgatttccttgcgaatggtcaagcagccaaaggtttgattcaaatcatcgaacaagccggggctcaagtcgaagcgattgggatcgtgattgaaaaatccttccaagatggacggggattgttagaagagttgggatatccagttgtatccctcgcacgtttggaccgttttgaaaatggtcaggttgtatttaaggaggcagacatctaatgcaaaaacaagaaagccattcacaggcggctattttaggcttgcaacaccttttggccatgtattcgggatctattttggtgccgatcatgatcgcaggagctttgggctataatgctcatcagctaacttacctcatctctacagatatcttcatgtgtggggtagcaactttccttcaagtgcagctcaataaatactttgggatcggtcttccggtagtccttggggttgccttccagtctgtggcacctctcagcatgatcggggctagccatgggagtggtgccatgtttggtgccttgattgtctcagggatttatgtcatccttgtctctggtttcttctctaagattgccaatctcttcccatctattgtaacgggatctgttattacaaccattggtttgactttgattccagtagcgattggaaatatgggaaataatgcgccaaaaccaaccgttcaaagcttgatcttggctgtggtgactattcttatcattctggttgtcaacatctatacgacaggctttattaaatccatttctatcctgattggtttgattgcagggactgccattgcggcttctatgggcttagtagacttcacacctgtggctcaagcaccagtcgttcacgttccaacaccattcttctttggagctcctaagtttgaaatcacctccatcttaatgatgtgtatcatcgcgacagtttcgatggttgaatcaacaggtgtctatcttgctctttctgatattaccaaagatccaattaatagcacgcgccttcgcaatggttaccgtgctgaagggttggctgttctcctcggtggtatcttcaataccttcccttacaccggattctcacaaaacgttggcttggtgaaattgtctggtatcaagactcgtcttccaatctactatgcggctggtttccttgttcttcttggtctccttcctaagtttggagctttagcgcaaatcattccaagtccagttcttgggggagcgatgctggtcatgtttggttttgtatcgattcaagggatgcagattcttgcgcgtgttgattttgaacacaatgagcacaatttcttaatcgcagctgtatcgattgctgcaggggttggtttgaacaacagcaccctcttcaatggccttccaacaggattccaaatgttctttgcgaacggaattgtcgttgccagtgtcttggcgatcgttctcaatgctattttaaaccgcaacaaaaactaatctcacatgaaccggaggtccttggatcttcggtttttttgacttttaaagaaacatatagtagagtggaagaggagaaaatcttatttgatgagaagagagttagaatcatgtatgtaacctatcactttaaagagcgcttgcgcttgtttttgagtctatttttgccgattttgatctaccaattggccaattattcagccagctttgtcgatacagccatgaccggtcagtaccggacccttgatttggctggtgtttctacagctaccagtttgtggaatccattttttactttcctgacagggattgtctctgcgctgacaccgattgttgggcatcatttaggaaagggaaataaagaacggattgctggcgatttttaccaattcctctatatgtcatttggtatggctattctcttaataggctttgtttgggggattgcacccatgattctcaagcagatcggcttagaaaatgttgttgcccaaatagccattcgctatttatatttcctttctctgggaatcttacccttgttgctctttagtatcgtgcggaccttcctcgataccttgggaatgacgcgtctatccatgtacttgatgctcttgcttttgcctctcaatgcttgttttaactatatcctgatctatggggcatttggttttcctgagatgggaggagcaggagcaggtcttggaacctctctggcctactgggtcttgctggttattgcggttttgattttgtgcaagcatcccaaggtagcacctttccaattgtggaagccgcagccttatgattttaaagggatgaaagaagtattgcgacttgggcttccaatcggtggaattgtctttgcagaagttatcattttctcgttggttggtctgttaatggcaaaattcccatcactgaccatcgcgagccaccaatcagccatgaatttttctaccctgatgtatgctttcccggttagtatctctagtaccatggcgattatcgtatcttacgaactgggagcaggaagaccagaagtggtcaaacaatattgccgtttgggacgactgacagcctttggatttgcgattgtcactctcgtctttctctatacattccgcttccaactagcagggctatatggcaaggatccagtctttgtgcagcaaacagcgattttcatgacctatagtctctttttccaagtagccgatacctttgcagcacccctacaagggattttgcggggctataaggatacaacggttcctttcttattaggagtctttagttattggtgtatctctatcccactagggattttccttgaccatgtgactaacttgggtccctatgcttattggatcggccttatttctagccttgtcgtgagtggaatttgttaccaacttcggctctggcagatcgaaaaaaaacaaacaaactaaaatgaagtctgggaaaccaggctttttgtgtaccgtgaatattataaattttctgaaagttcttgacaattgatgtcaaagtggtaagattaggaggtagaaatgaagaactagaaggagaacaagatgagaagtgatatgatcaaaatggggatcgaccgagcaccagcgcgtggtctcctctatgcaacagggcaagtaaaatcagcaaaggatatgcaaaagccctttattgccatttgtaactcctatattgatatcgttccaggccatgtacacctgcgtgaattagcagatattgccaaggaagctattcgcgaagctggtgggattccttttgaatttaataccatcggtgtcgatgatgggattgcgatgggtcatatcggtatgcgttatagtttgccatcacgcgagttgatcgcagatgctgctgaaacagtcatcaatgcccactggtttgatggtgttttctatattcccaactgtgataagattacaccaggaatgattttggcagctatgcggaccaatgtgccagccgtattttgttctggtggacccatgaagggtggtgttgacatgacagggcatcaggcgacactctcaagtttgtttgaagctgtaggtacttatcaagctggtgatatgagcatggatgagttggatttcttggaaaaaaatgcctgcccaacttgtggctcttgctctggtatgtttactgccaattccatgaactgtttgatggaagtattaggtcttgctcttcctggaaatggtaccatcctagcggtttcagatgaacgtcgggaattggttcgccaagcggccaaacaattggtagagaatattaaaaaggatatccgcccacgggatatcgtgaccaaagaggccattgatgatgcctttgcgctcgacatggccatgggtggttctaccaatactgtgcttcatacgctcgctattgcgcgtgaagcagggattgactatgatctcaaagatatcaacgagattgctaagaagacaccttatctctctaaaattgccccttcaagtgtttacactatgcatgatgtgcatgaagctggtggtgttccagccattatcaatcagttgatcaaaaaaggggccattaagggtgatcgtatcacagttactggtaaaaccttgaaagaaaacgtagctggtgctgaaatcaaaaatgaagaaattatccatccaatcgagcatcctatttcacctgtaggtggtttgtcgatcctttacggaaatatcgctcaagatggggctgttatcaaggtcggtggggtcgatccatctgtgactactttccgtggtaaagctatttgttgcgattcacaagatcaagcccttgagttgattgacaatggaacagtcaagaagggacatgtcgttgtcattcgttacgaaggtcctcagggtggtcctggtatgccagagatgttggcaccaacttctaagattgtcggacgcggtcttggtaaggatgtggcactgattacggatggtcgtttctcaggagctactcgtgggattgctattggtcacgtttccccagaagcagcagaaggtggaaatatcgccttgattgaagatggggatgaaatcgtgatcgatcttccaaatcgtaccattgatttgcttgttgatgatgcaactcttgcagaacgtcgcaaacatttgaaacctttcaaatcaaaaatttccagcggttggttgcgtcgctatacagcctttgccaaatcagctaatgtcggtggaactctgatgagtgatgaagaattcgaagaacgtaaagcagaacgtcaagcacaagaaaaataagaaaaaccctttcctgctatgtgttatcacaagcaagaaagggttttttagtggaaatattatttggtgcgcatttcaccttgagggaagtaggttccttcaggcatatcattaatgataacgtgaacagctgactgaggagcaccagtattgcggacaacagcctccgttacttctttggcgagggctttcttttgttccaaagtgcgtccttcaaatagatcaattcgtacaaatggcatagggccacctcctaaattttttataggactattttatcacattttgggatacaaaggtcagcaaaattatggtaaaatgataatgaaacacattttagagagaacagaaggaaaatggcacaattatattataaatatgggaccatgaactcaggtaaaaccattgagattttgaaggtggcccataattatgaagagcaaggcaaaagcgtcgttatcatgacctcagcaatcgatacgcgcgatggatttggagtggtttctagccggattggtatgaaacgggaagccgttgcgatcgaagacgaaaccgatatctttggctttattaaaaaccaagcaatcaaaccttactgtgtcttaatcgatgaagctcagtttttgaaacgccaccatgtctatgatctggcaagagtcgtggatgaactggatgtgccggtgatggcttttggcctcaaaaatgattttcgaaatgaactctttgaaggttctaaacacctcctcttgttagcggacaagatcgaggaaatcaaaaccatctgccaatactgttcccgcaaggcaaccatggtcttgcgtacccaagcgggtaaacctgtctatgatggagagcagatccagatcggtggacacgagacctatatctccgtttgccgcaaacattattttaatccagacataccaactgaaagcgtctagaacgttttagagaggataataatgtctatttgtttaaaagatattacaatagagaattattttgacgttttaaatctagaagttcatccaaaccaaaggaattttattgcatccaattccattagtttagccgaagcctatgtatatgataaaaatggtgattttatagctcccttagcagtttatgataaggaagtattagttggttttgttatgattgcctatgaccagaaaattgggatcagcaaggggaactacttgttatttcgttttatgatcgataaacgatttcaaggtttaggctattttaaaccgactatggatgcagtcattgactttgttcgaacagagccagctggaaaagcaacaagtctttggttatcttatgaaccggaaaataatcaagcgagatcttgctatctccattatggatttaaagaaactggcgaagtcatagaaaacgaaattgtagcaatctatgatctaacaaccaagaattaaggagcaaacatgaatatctatgatcaactacaagctgtagaagaccgatacgaagagttaggagaattattgagtgaccccgatgtggtctctgataccaaacgctttatggagctttcaaaagaagaggcttccactcgtgatacggtgacagcatatcgtgagtacaaacaagtccttcaaaacatcgttgacgctgaggaaatgattaaggaagcaggcggcgatgcggacttggaagaaatggccaagcaagagctaaaagatgctaaggctgaaaaagaagagtacgaagaaaaactgaagatcttacttcttccaaaagatccaaacgatgacaagaacattattttggaaatccgtggagcagctggaggagacgaagcccaattgtttgctggcgacctcttacaaatgtaccaaaaatacgcggaaagccaaggctggcgctttgaagtcatggaagcctcttacaatggcgttggcgggatcaaagaagtagtggccatggtttctggtcaatcggtctactcgaaactcaagtatgaatctggtgcccaccgggtacaacgcgttcctgtgacggaaagccaaggtcgtgtccatacctctacagcaaccgttctggtcatgccagaaatcgaagaagttgagtatgacattgatcaaaaagaccttcggattgacatctaccacgcttctggtgcgggtggacaaaacgtcaacaaggttgcaacagctgttcgtatcgtccacttgccaactaacatcaaggtagagatgcaggaagaacggacccaacagaagaaccgcgaaaaagccatgaagatcatccgtgcgcgtgtggctgaccacttcgctcagattgcccaagatgagcaggacgctgagcggaagtctactatcggtactggtgaccgttcagagcggatccggacttacaacttccctcaaaaccgtgtgaccgatcaccggattggcttgacccttcaaaaactggataccatcttatctggtaaattagatgaagtggtcgatgctttggtcttgtatgatcaaacacaaaaactagaagagttgaacaaataatgttgttgggaccattattagcccagtatgaagaagaattaatagccgttggagaggaagcagaaagcctctccttcgcgtatcgtgctttaaaaaactggacttttacagactttgtccttgccttgcaaaaagaagtggaagtagaggatcaggccttgcttctatccatctttgagcagttgaaacatcacgtccctgcccagtatattattggtagtgcagaattctgtggccatgtttttacagtggatgagcgcgtgctgattccacgcccagaaacagaggagttggtggctctaattctcgaagaaaacgatgagaaatccttacgagttctggatattggtacaggaagtggtgctatcgctattagcttagcccttgctagacctaactggcagattcaagctagtgatgtctcagaggaggccttagcccttgctcatgaaaatgcccagcagttagaagcagtcgtttcctttaagtcttcagatgtactagatgatctagaaggtccatacgacctgattgtttccaatccaccctatatctcgcgtgatgatgtagaagaagttggagccaatgtattagcctctgaacctcacttagctctctttgcagaccgtgatggatatgctatctacgaaaagattgcccggcaagcaccaagtgttttaacaccagaagcgaaggtctatctagagatcggctataagcaaggtaacaaagtaaaagagctctttcaaaaggcatttcccgacaaacaagttcgagttttgaaagaccaatttggacaagatagaatggtagtagtagacaatggatcacattgagaaagaattagaagcaggacgtgcggttattctgccaactgaaacagtctatggtattttcgctaaagctttggatcaagaggcagttgattatatttacgaattaaaacgtagatctagagagaaagccctgaacttgaatgtagcaaatgaagaaggtgttcgaatttattcgaaaaatcaacctagctatttaacaaaactgattgattcatttttacctgggcctttaactattattcttcaagcaaatgaaaaggtgcctgactggattcattcagggatgtctacggttggctttcggatgccagcccatccaaagaccttggaattaattcgtaaatatggtcctttagttggtccttctgcaaatctatctggacacgctagcggaacaaagtatgaagctattataaaagaatttgatcaggtaattcctggctttgaggatgatgctttccttactggccaagattcgactatcctagatatttctggggccaaagcgaggattttacgacaaggttctattacgaaagctgacttgcttgcacaagtgcccgagctttcttttgaggaagataaccttcctctgtcataatgtatataaaaaattatttaataaggagtagacctatgatttttgataaagaagattacaaagcctatgatgcagacctatggaatgcgatcgctaaagaggaagagcgtcaacaaaacaatattgagttgattgcttctgaaaatgttgtctctaaggcagtgatggctgctcaagggtctattttgacaaataaatatgccgaaggctatcctggtcgtcgttactatggcgggacagatgtggttgatgtggtcgaaagtctcgcgatcgaacgggctaaagaaatctttggggctaaatttgcgaacgttcaaccgcattcaggaagtcaggcaaactgtgctgcctatatggccttgattgagcctggtgatactgtcatggggatggatctagctgccggtgggcatttgacgcacggagcttctgtgagcttctctggtcaaacctataactttgtgtcctatagtgtagatcctgaaacagagctcttggattttgacgccatcttaaaacaagcccaagaagtgaagccaaaactcatcgttgctggtgcctcagcctactctcatatcattgatttctcaaaattccgtgagattgcagatgcagtaggagctaagctcatggttgacatggcccatattgctggtctcgtggcagcgggtcttcatccaagtccagttccttatgcccatatcacgactacgaccactcacaagacccttcgtggacctcgtggaggcctgatcttgactaatgacgaggaattagctaagaaaattaactctgctattttccctggtattcaaggaggaccgttggagcatgtcgttgcagccaaagctgtcgcttttaaagaagcgcttgatcctgcctttaaagagtatgcagctaacgtgattaagaacagtcaggccatggctgatgtcttcttgcaagatcctgatttccgtgtcatttcaggcggaacagagaaccaccttttccttgtcgacgtcactaaagtcgttgaaaatgggaaagtggcgcaaaacttgttggatgaagttaatatcactctcaacaagaactctattccttatgaaaccttgtctccatttaagaccagtgggattcggattggtgcagcagccatcaccgctcgtggttttggtgaaaaagaaagtcgcaccgttgctgaactcatgatcaaagcgctgaagaatgcagataatcaagaagtattagacgaagtgcgcagccaagtcaaagccttgacagacgcttttccactttacgaggactaaaccatcttatggatatttacgtaaaaaaagccatcattcatcaatttagcccagacgataccgatttctatttggcagataaatttctcaatatcacgcctaaaatcgaggaatacttgcataagaagattgaacgggtctactcggatgaagccaggactggtattttcgaagaggacaatccttttcttgagatgatctcaaatgacctattagaaacctcggtcgcagtagcgaatcgttggaaggaagaatttgtcgtctctgaaaatcaaaagaccaacgatttggtgttcattcaattctcaaaagaaggggtggaccattttgcctttcttcggatcgccttacgggaaaccctgacgcatcttggtggtgaagtggataatccgattaagctgacgcaaaataatctacctggttttgggactggtgctgatgaggccttggtcatcaatcttcaaagtcgcaaataccacttgattgaaaaacggatcaagtacaacgggactttcttgaactatttttctgagaatctgttgcaggcgcaacccaagatctctcctaaaaaatcgatcaaggcactagaaaaaacagcccagaagattgcggaaagctttaacactgatgattttcaatttcaatcaaaggttaaatcagctatttttaatcatattgaggaagaaaataaactctctcctgagaaattagcggatgacctcttcgatgataatctgacagctcgcctcagttttattgaccaagttaaagaagctgtaccagagcctgtcacctttgaagagattgatgcaagtcgccagttgaagaagttcgaaaatcagaaattgtcattgtcaaatggaattgaactgatcgttccgaataatgtctatgaagatacagaatctgttgaatttattctaaacgagaacggcacctattctattctgatcaaaaatattgaggatatacagagtaaataatgattaaacgtatagtgaagatcttcttattcatcttactaatatttggaatctacaagggaattcagatccaccatgatgtcaaacaagtcatgcagtaccgctccctggttagagaagtccttgctgaggaggacaccacggccaatgaaaacctcattcttgctatgatctatactgagaccaaaggcagagaagacgatgtcatgcaggcgagcgagagtgcaagtggtgagaccaatactattagtgataataaggccagcattcgccaaggaattcaaactctttcagatgagttaaaagaagccaagaaaaaaggcgttgatagctggactgcggttcaagcctataattttgggaaagactacatcgattacgtcgcaaaacacggtgggacaaattccctagagttggcccgagcttattcacgggatgtagtagcgccaagtcttggcaatgtaaccggtgaaacttatctttacctccaccctatctctcttttaaacgggatggaactctacattaatggggggaacatttattattctcgtttagtagaaaccaatatgacgattatgaagttattttcatggttttaatcattttccagagagccgattggctcttttttaagctgatcagttctgcctccgattttgagggataataaaaatgtcatgcattcttaaaaaaactgtaagctagttttaagaaatcaactgtataatgaaaatcgaagtgggtaaactctttatttacttcttttttcatctctagtgaggtgagaaaggtaatatgagatacccagaggtaatttgaattagaaagaagaaaaagatgaaattaaagaagattgcattgtttgtaacgacgactttggctttgtttacagctgtcccacgtgtttctgcagatagcaatgtgcagaaagtcatcgatgaaacctatgtcaaaccagactatgttttgggctattcgctggaccaaagtcaaatcgaacaaaccttgagtctcttgaactacgatagttcaaaagataaagaagagtggaagaccatgacaccagaggtttattcttcaattataaacgttgcgaacgatgatagtttggaactttattcctctgttaaaattcaaaaattaggcaaaaataagccactagaagtgaatatcgtgacacctcaaaatatcaccaaggtcactgcagatatgtatcgtaatgcagccgttacacttggattggagcatgctcaaattacagtagcttcacctatacaagtgactggagaaagtgctttagctgggatctattactcgcttgagaaaaatggtgccaaagtttctcaagaaagcaaagatctggcccaagaagagttaaagactctatccgggatcaatgaagaaaacgctggtaagaaaaactttgatgcggataagttaaacgtagcattgaccgacattaaaacagcagtagccaatgctaaacagaacaatcaggatttaagcaaggatgatattcgaaagatcgtcgaagaaaccctgaaaaattataagctggatacaactgtgacaggcaaccagatcaatttgatcgtgaatttcgcagtcaacctctcaaagagtagtgtcatcagtagcaaaagctttaccaagaccttgtcggatctgaaagatagtatcgtagacaaggcaggcgatacctttaacaatatcaatctcaattttgataccaatgccattttaaaagacagtgggaacttcttcacaaatgcgtggaatgccattgccggcttcttcggagccatctggaatgccattgtcaaattctttagtggtttagttggctaaaaatagcaggaaagcactcctgacaagaagtcagagtgctttttgcgtttgattacctatttttagaactgctaaattcttattttaagctagttaatcaaggtcccacggaccttaaacttgctctattattttatgctcatgaaaaaaggtcccacggaccttttttttattcccactctacagttgcaggtggtttacttgtgatatcatagacgatgcggttaacgtggtcaacttcgtttacgatacggactgagattttttggagaacttcccaaggaattttagcgaagtcagctgtcattccatcgatagaagtgatagcgcggatagcgatagtgtagtcgtaagtacggccgtctcccataacacctactgaacgaacgccagtgttaacagtgaagtattgccagatatcgcggtcaagacccgctttggcgatttcttcacgaaggatagcatctgattcacggactgtttcaagtttttcttcagtaatttcacccatgacacggatagcaagccctgggcctgggaatggttggcgccatacgatgtggtctggcataccaagctctgtaccaagggcacgaacttcatctttgtataaagtgttgagtggctcgatcagttcaaactgcatgtcctctggaagtccaccaacgttgtggtgagacttgatagtttgagcagtatcggtaccagactcgatcacgtctgtataaagtgtaccttgagcaaggaatttcacatctttaagtttgcttgcttcgtcatcaaagacataaacaaactcgttaccgataatcttacgtttttgttcagggtcagatacaccagccagtttatcaaggaaacgtttagcagcatctgctttgacgatattcaaaccaaacttaccaccaagcatctccatcacttggtcagcttctcctttacgaagaagaccgtggtctacaaaaatacagatcaattgatcgccgatggctttttgaaggagaaccccaacaacagaagagtcaacaccacctgaaagaccaagaaggacacgtttgtctccgacggtttcacggatttttttgatctgcatgtcaatgaagttgtccatggtccagtcacctttagccccacagatgttcaaggcaaagttacgcaagatgtcataaccgtgaacagagtgacgaacctcagggtggaattggatcccgtagattttcttgtctggattttcaatcgatgcaaatggacagtcagcagaagtacctgtacggataaagtcagccggaatttctgtaacagcatctccatggctcatcaagaccaattgtttgtctggtgtgtccgcaaaaagagcagaagattctgtcaagctgagttcagattgaccatattcacggttaccagcgtcacctgctggaacgaccttcccacccaatttatgggtcaacaattgcatcccgtaacagattccaaggattggaataccgagttcaaaaatttcaggatcgatatcaaaagacccttcctcgtatactgagtttggtccgcctgaaagaacgatcccaactggattgattgcacgaacttcatcagcagaaatcttatggctcttcaattctgagaagacaccaatttcacgaattcgacgtgaaataagctgattgtactggctaccgtagtcaagcacgatgattttttcaacatcatgcaaatcagttgataggtttgtcatcttatccccttcttatagaaatttactttcctctattctaacacaaaagccatgtctttaccaatctctgattgaagaaataggaattttacgctacaatagaagtaacacagagaaagagcaatgttatgattccagcttacattcaaattcatgatcagattaaatctgagattgatcaaaaaatatggaaaattggagagcggcttcccagtgaacgcgatctagctgaaaaattccaggtgagtcggatgactcttaggcaggccattacccttctggtcgaagaaggagtacttgaaagacgggtaggaagtggtacctttatcactagcacgcgcgtccaagaaaaaatgcgcggaacaaccagttttactgagattatgaaatcgcaaggcaaggaaccttctagtcaagtgatttcttaccgtaaaaccattcctagcctccaagaagtggataaattaggcatcgataagacagacaccatcattcggatggagcgggtccggtatgcggatgggatccctgtcgtttatgaagtagcttccattccagagaaatttattaagaatttcaatcgcgaagaggtcaccagtcatttcttccaaaccttggagcgtcatggttataagattggaaagtcgcatcagaccatctatgcgcgattagccaaagataagattgcggactatttgcagatctcaaaaggacaggctattttaggattgacacaggtttcctattttgaagacgggacggcttttgagtatgtaaaaagccagtatgtcggcgagcggttcgaattttatttggaaaataactaagctcgcaattcacagtaataaaaaactcttcaaatgtccgaggcatattaccagggcatttgagagcttttttagtgagaactcattctttctaaatagtgatagtatggtcataaataaaagatttgaaaaaatttttaaaaaatttttattttttcttcaatttttgattttttttacgaattaatagatagaagctagttttagatctaaaaaaagatataaggcaggaaaaaaatgaaaaaaattaaaattgatgtggtagctgttcccttgagtgggcatctgtacccaactttaaatctcgtcaaacccttattggatgatccaactatggaaatccgggttttcacaggacctcagaaaaaggccgttgcagaaagtctgggcttcactgtcgttccgattctagaggacaaagtagaagaatttgaacgtgcggctaataacgataaaaaacacaatctcttttcagcctatcggcaattgtccaagagcctcgatttgattaatcatgtatcggatcaattgttagaggagtggcgcgtcaatcgtccagatattgtgattgctgattttatcactctatcagcaggctttgtggcagaacagttagaaattccttggattaccaccatggcgacccaatttgcaatcgaaactccttatggtcccccttgcttcttcggagggatgggaattgcgcgaaccaagaaggaagaaaagatacaggcactatgccgtaaactcacgcgcattggaaaatactgtggggctttcctcttacgcaaacgattaaaacgttacaatttcaagttgtacaatcaaaatggagtggagactatttactctccttatgctatctttggaattggtatgatggagctggagttgaaaacacatttccctcatcaatatgcttggcttggccctttggggacttctcttgaaaaagcagaagattatcctttagatctcagcccttatgaagacaaaaagaaggttctcgtgacttgtgggactcagttgccgtgggcaaaagaaaatttgctccatcaaaccaagcagttagccaaagagcatccagaatgccacttttttgtcacactaggagacggggcaaaagaattttctgaagaagaagtagcgccaaatgtgacggtcgtaacttatctcccttacaaagaatacataccgcaaatggactatgtggttcaccatggaggggctggaatcttttatcagtgcatcgaatttaagaaaccagccttgatcttgccgcatgattatgaccaatttgactatgccattcgaggagtagaagcagggattgcttttcaagctcatcgaaatcgtactgaagaaattcaagcaggttttaacgcccttttagaaaaagaatcttgggaagagttagcgagactaaacaaactatcaaaaacctacaaaccgttggataccttagagtttgaaattcaacgattattaagacgtggaacggatggaaaactatgaaaattcttgtaacaggcgcgactggctttcttggaaaatatgtgattgaggagttgttggatcacgactattccattgtagcctttggccgaaacgaaaaagttgggaaggctctggaaagagagcgcgtccaatttgttaaaggagatttgagctctattgaggaactaagacaagcttttcaggaaattgatgctgttgttcatgcaggagccttgtccactgcttggggaccttggaaggctttctatcaggcaaatgtcatcggcacccaaaatatccttgacttgtgccgtgaatatgcagtaaaacgcttggtttatgtgtcttctcccagtatttacgcagctggaaaagaccaattcgatatcaaggaaagtgatgctccaaaagaaaaccacctcaacaattacatcagaagcaaattggcgtctgaaaaacttttttctgattattcagatgtgccaagtatcatcttgcgacctagaggattatttggtgtgggagataccagcattttgcctcgtgtcttacgcctcagtcgaaaaattggaattcctttgattcgaggaggagagcagctcatggatatgacctgtgtggaaaatgttgccctagccattcgcttggctctggaagccaaagaagcacacggacaagtatataatattacaaatggggaaccaaagacctttaagtatttgattgaaaccacactaaagggattgggagagccgattcgctatcggaaacttccagcaggtctagtagcaggtgcggcttatagcctggaagaagtatatcgattctttcatctgaaatccgaacccccattgactcgctatacctattatctccttcgatatagccaaaccctcaatatccaaaaggctcaaaccgaacttggctactatcccaaaatgaccattgaagaagggattgacaactatgtccaacatgatcaagcgcattgattattttccagctggctattgtagcagtcattctggtctcttattcaaagggattccgaatgaaaaaatgcaatttccagcaggtgtctttttgattcaccaccgtgaaaaaggctatattttgtacgatactggctatcactacgagattaagaaaagagctcggtatttctggtaccgtctagccaccccaatgcagatgaaaaaggaagaccagatcgattatttattgcaagagcgggggattgatcctgcagaaattacttatgtgattctttcgcatttgcatccggaccatctcggcggagcagccctttttccaaatgctcatttctttgttacccaggaagtctatgaagtctaccagaatccgaaattcaaagatctgatttttaaagagtttttgccagctgatttcaaagatcgggtaacttgtctcaaagcagatcaaaggcatcctgctttcccctatcgcccaactgcggatctttttggagatgggagaattcttgtttcgtccatcgatggacatgcgagagggcaaggctgtctttatctggatgagctcaaactcttcatcggagcagatctttcttggggagtggatctcttgccttacacaggacaaatgcgtctcattccttccttggttcaagatgataagaaggcttatcttaaaggagctgatttgctggaaacactcttgcaagatggcattcaagttgtggtcagccacgacccgcaagatcggattgaaaggattttaaatgaaaaaaacagtctttctgaaaacctttattgaaaccagatggtgtcaccgattccgttcaaaagaggccttgaagcgataccaagataagcaattggcacgctaccatgcttttatcacttctcagtccccctattttcaaacccattctcccgaatcctttggaacgatggataaaaccttcatgatggcacatttcaatgagctcaataccctgggagtggatcgcgatcaggctttagagatggcgattcgcggggaacagacgcgagattttactgagatgaatggagaagtagcagtaggcttgtcttctgggacttccggccaccgaggagtttttgtcaccacagaaaaagagagaagtatgtgggctgcagcgattctagccaagatgctaccgaaaggaaaactctttggtcatcgcattgcctttttcttacgagcggacaatgaactctatcaaaccattaattcaggcctgatttgcttggaatattttgatattttcaaggatagcaaggagcatttagagcgtctcaaagactatcaaccaaccattgtggtcgcaccagcttctaccttgattgagttagccaactatgtcagcaatcagcaacttgcgatccaacctgtcaaggttgtttctgtcgcagagattctagaagatcgagatgctcagaccatcgccaaagcctttcaactagacaaggttgatcaggtctaccaagcgaccgagggatttttagcttgtacctgttcagaaggcaatctacatcttaacgaagatattttgtatgtcgaaaaagagtatcttgatgatagccgcttttatccgattattacggatttcaaacggaccagtcaacccatctatcgctaccgactcaatgatattttggtggaagaaaagtctccttgcccttgtggttccgtctttactcgaatcgcaaagatcgaaggacgatcagatgatatcttctatttcaaaaaagaagatggtagtagccagatgatctatccggattttattcggcggtgcattctctttgtcgaaaatattcaggactatcaagtaactcagttggcagatggatccattaccattgccttgagtcaccggacagagtctatggagcaagcgatctttgctcaatttgaactcttagctcagcaaaaacaattcattctcccaagtattctatttatcgattaccaatgggactcaacacgtaaattaaaacgtgttcaacgacttcaataaaaggagaatcctatgactaccgtaaaaagacatttgcaaattaaaggctatggaacagcgcttccagctcatacagtaactttcaaagaccagactcgttaccgcgtgaaagaaggagaagaaacacagattgatcttgcagcgcgtgcgattgaggcagctttaaaccatgcaggacttgagatgacagacatcgactgcctgatttctgctagtgcggttggtgttcagcccattccttgtacagcagctcttatacatgagcgcgtggccaagggactgacgattcctgctatggatatcaataccacttgtaccagttttgtatcagctttgagcactgtttcttatctgattgaaggtggtgaataccaacgggttctgattgtatccagtgaagtaggaagcctagggcttaatcccaaacaaaaagaaagctttgaactgtttagcgatggcgctgcagcctttatttttgaagcaacaaaggaagataaaggaatcattgccagtatgcaacgtacctggtctgagggagcccacgataccgaaattcgtggtggtttgacagcttatcatccgaaattgtactctgaagcaaccaagactgatttcatgtttgacatgaaagggaagaaaattcttttgctttctgcccgtgttattccagaaatgttccaagaattccaagaaaaatcaggcatttctaaagatgctgtagactatattattccccaccaagcaagtcgcgctttgccactcgtcatggataaattgggagttagcaaagacaagtacctcaatattgtcagtgattatggaaatatggtttcggtagccgtgcctttcggcctagcctatgcactggatcatggctatgtgaaggaaggagataccatcttcttgatgggaactgcagcagggatgacggtcaatatgttggcactgaaactttaatgatgaatcctcttacttcaagctcaaaaagcatcaagtcccgctagtctttagcgggcttttttgatataatgaaaggtatggaaattgagaaaaccaaccgaatgaatgcgctctttgagttttatgcagcgctcttgacggacaagcagatgaactacatcgagctttattacgcagatgactacagcttggctgagattgcagaagagtttggagtgagccgtcaagctgtttatgataatatcaagcggacggagaaaatcctagaggattatgagatgaaattgcacatgtactcggactacattgtacgcagccagatttttgatcagattttagaacgctatccggaagatacttttctacaagagcaggttgaaattttatcaagcattgacaatcgggagtgattatgggcagtctcgtcatttatcaaggaataccttgcaaactattagtagcagaggaagtatttcctactcgactacagattatctcgcccaatgatatctccaaagctatgcaaataggttttagctgttggggatatccaaatgaaatcatgaaagaagtcacacccgaagaactagaatgtttgcaacatttcgaacgatttccactgaattgaaaaaataggagaaaataatggcatttgaaagtttaaccgaacgtttacaaaacgtctttaaaaatcttcgtaagaaagggaaaatctctgaagcggatgtccaagaggcaaccaaagagattcgtctagccctcttagaggccgacgttgcccttcctgttgtaaaagacttcatcaaacgggtccgcgaacgggctgtagggcatgaagtcatcgaaaccctcaaccctgcccaacaaatcgtgaagattgttgatgaagaattgacagcgattttaggttcagaaacagcagaaattatcaaatctccaaagattccaaccattattatgatggtcggtcttcaaggggctggtaaaacaacctttgcggggaaattagctaacaaattggtcaaggaagaaaacgcacgtcctttgatgattgcggccgatatttatcgtccagcagccattgaccagttgaagacccttggtcaacagatcaatgtccctgtcttctcacttggtacagaggtccctgcagtagagatcgttcgtcaaggtttggagcaggcgagagccaaccacaatgactatgtcttgatcgatacggctggtcgtctgcaaatcgatgaaaaactcatgggtgagttgcgcgacgtcaaagctcttgctgagccaaatgaaatcctcttggttgtggatgctatgattggtcaagaagcggccaatgtggcgcgtgagttcaatgaacaactcgaagtaaccggggtcatcttgaccaagatcgatggggatacccgtggtggtgcagccctttctgttcgtcagattactgggaagccaatcaagttcactggtactggtgaaaaaatcaccgatatcgaaaccttccacccagaccgtatgtctggtcggatcctcggtatgggggatatgctgacgctgatcgagaaggcttctcaagaatacgatgagaaacgctctcttgaactcgctgaaaaaatgcgggaaaataccttcgatttcaatgacttcatcgatcaattagaccaagttcaaaacatgggaccaatggaagatctgctcaagatgcttccagggatggccaacaatccagccatgaagaacctcaaggtagacgaacgagaaattgctcgcaaacgtgcaattgtatcatccatgaccccagctgaacgggaaaatccagatctcttgaatccaagccgtcgacgtcggattgctgctggatcagggaacacctttgtcgaagtcaataaattcatcaaggactttaaccaagccaagcagatgatgcaaggtgtcctctctggcgatatgaacaagatgatgaaacaaatggggctcaatccaaataatatgccgaaaaacatgcctggtggaatgccagatatgtctgccctcgaaggcatgatgggacaaggtggcatgcctgacttgtcagctcttggtggaggcgctggaatgcctgatatgagccaaatgtttggtggtggtctcaaaggaaaagccggtgaatttatgatgaaacgggcgatgaataagatggccaaacaaatgcgaaaaaataagaaaaaacggaaataatcgtttctaataagggcctggaacacagtgttctgggttcttttagaaactactactagaggaaagatgttaaaaaaactatttcaacaagtcattcgtttctttgcaagattgttttcttcgcacaacaagccctttgaattcccaaaaggatcgaagaaaccaccgatcagaccgatcatctttgtacctgggagttcagctagtatacagcgattcaatggaaccattcgcatgctccatcgcttttctagaaaaaagcaaagtcttttaaaaataaaagtcaacaaagatgattctatagagatggagggaagactgaatacgaaagagccgaatccgatgattgtgattggcttcgagaacaatcgagacggctacagcaatatcaagcagcaaatcgaatcccttaagattgctctaacctatcttcttgatcactattattttacagagttcaaggcagttgggcactccaatggtggactagttttgactggtttattggaaagtggctttttagagaaaaagaaggtaaccgtcagcaagttggctattattggcagtccttaccaattcaatcaagaaatgtttgacgattttcaaacatggaagcatcgcctgggaaaagaagtagaagtccttaattttgtcggtagctttgctggaaaatcagatggcatcgtccctctttctagcgcacaagcagcacaatctatttttgacaatcaaacctatacagaagtgaatttaaatggtcgtaaggctcatcattcagctttacccactaatccagatctagtaaaacaattaagtctgtttttgaatctataattaaattacataatttcggttatgtaatttttattcgtctcttgcaatccttaggtaaatatggtacatttttggtagcgattacacatacctaaggaggattttatgaaagatcctaaattactagagacaatgaaagcatacaagggacgagatgacgttcctgttgattttgatagcttttggaatcaagccctagcaaagatgactgaactgccagaatacaagctcgaagaacgagatttcagcattccaaatgtgatttgttatgaattaacctttaaaggaaccagaaatggccttgtctattcaagaatgatcctcccaaaaacggatcaaaaggttcccgttgttttccattttcacggctatatgggccgttgttgggattggtccgacatgctggcttatacagtagctggctatggtgttgtatctatggacgtaagagggcaatcaggctattcaacggacggagatcgctcaccacttgggaatacggtaaaaggacagattatccgtggagccgtggaaggtccggaccagctcttttataaagatatctacttagacctttaccagttaattgaaattgtagccaaccttcctcaagtagatgacagcaaacttgccagctacggagcctctcaaggtggtgccctggctttagttgctgctggattaaatccccgaatccaacgaacagtcgccatttacccattcttatcggatttcagacgggtattagagattggaaataccagtgaggcttatgacgagcttttccgttatttcaagtttcatgatccattccatgagaccgaagatcgtttgatgcagactttggcctatattgatgtaaaaaactttgcccatcgcatcaaaggacaagttcacatgattaccggtctagatgatgatgtctgttatcctgtgacacagtttgccatttataatcgattagaatgtccaaaagagcatttaatcatgccagaatatgcccacgaagctatgaacgttcaagtcaatgatagagtctataattggatctgtggtagcaagattccatttagatatgtagaaaaataaattatagaagaaaacaatcagtaaatccatgaggtttgctgattttattgtgtttaaaagggatctagaatagaaaggaaaactaaaagtttatgtacaattgactaaacaagacttaaaccattgatataactgaattagaagcataaagtacattatttaaaaagtgtactttatttttgttttgtacattattttggagtggtattttgtatgttttgtagtacgtaatattctctaatctaagaaattgatttgtacattttttactctaattggtgtagaagaagtggtggttcaattgtacattttatttaaaatatttatggttataagattagtatttgaagcataaataaagtagatacagtggtataatagtgtcaaaagactttcaggagaaatgagatgagatcgcatacagttattctaggcgctggtgctactattgcagcaataccagatggtgataaaaacggcaaaagttcttcagttatgaatggattgctaaaaaaactaaatttagaagaaattcttgctggtgttgaattacagacaaagagcgaaaatttagaggatatctactcagaattatttgagagagaagagtgctccgaaatagttagaaagctagaagaaagactctatgattattttgcttcgttggagttacctgatgaaccaacaatttatgattttttaatattaagtttaactaataaagattgtatagctacgtttaattgggaccctttacttatacaggcttatattcgctgctcaaaaattactctgaacttgccaaaaattctttgtttacatgggaatgtagctgttgggttttgtgaagaacatattgagtttggaggagtagattgctactgcccaacatgttataaaaaattaaatccaacaaaattattgtatcccgtaaaaaacaaagactattcttccgatggatacataaattggtgttggaaagcattagattactttgtcgatcattcatatatgttaactatttttggatacagtgctcctaagagcgatgtagatgctgttaatttaatgaaaaaagcatggggaaatattgaagaccgaccacttgaagaagtttccgtaatagatattatagacgaagagactatgctaaatacatggaaagactttattcatagccatcattataggtattcaaattcattttttgattcttacttagcaaaatttccaagaagaacttgtgaaaccgtatttgcaacattttcattaaatgttccttctgatggtagtagaggatttaaagagaattttaattgggacatgataaaagagtttttatctgatatgttagttgaagaacaggaaaataaaggaaaatcaaatttaaaatcgaaatatttagtttggggtgaagatgttaacaaataatccaattaatcatagtgtacttaaattgtcaatggatttcgataatgcttttaaacataaaaatataaaggaaatccatagactaatagaatttggaaaaaatatggaaaacactattgatgatatttccaaaattcaattattttattctattgggacagcatacgctgatatatttgaactaagtgataacttagttttcaacatagataccgattttacagttcaacaaatttattactttagaaaagctatagaaatttcaaataaagttgatataaattctgagaacagtaggtttgttttcccattattatgttcactttacactaattacgcaaatttattagatgcttgtggtagaaagcagttagctattaagatgtattgtaaatgtatacaaatcaatccaagattcacaatggctagtggtaacttagctatttgtctagatcattatcgtaattttttgaatgataacgaacacctccactttattaaaaaaattaaaaatttaatagaaacaagcataactgtttcagatccaaacagagttgattatgcagaaaagcgatttattgaactttacgaacaatatcttgattataaagatatagatgaatgttcttgtaaaacaatcgattataatcctaattcacaaaagtatcgtgaatggtgttggaacaacgggctgtatcttaatccacttaatgacttacaagctgacgatataaatagatatgatgataatcttttactaccaagtttattatttcaatcggataaagatttaaacaaatatatttctatgtttaatcaaattaagcaagaatatgtttatgcccgttatctctgttttaatagcattgagagtgattcggttcattatgctgacgagaatgttgatcttattgattgtctagactacgtacaatactctatccgagttgaaggattaaaagcatcttttaaaacactatattcattattagataaagtagctatgtttataaatgaatattattctttaaaaattgaaactcgaaaagtaaatttccattcaatttggagatcaaatagtgatttaaataaaatgttggataagaatattggtctgtcatctatattttggatagagaaagattttgataatggtgataattctttaacagctaatccaaactcaaagcgattgaaaattattagaaattatttagagcatagatttactaatataacattgaatatttttaatggaagtgaagataatgaagataataatgaaaccagactgtatctaactgaatctgaacttcaagagtttgcattagatttattaaatcttgtaagagaagttattttttcactcaaaaatgccattcaaataagtgaaaatgaaaaacaatctactctaagcagtgaagttgctttaattccgataaattatgaagaagtagatttggaagataaattatagcattgagcatacaatttatagtcgttataaaaagcaatagtctaaattcatttaactaatcgacttaactagagttaaaccattgataaaactgaattagaaggataaagtacactcattaagcagtgtactttatttttgttttgtacattatttgttgattgcttaatcaatactacatctctatcaggcaattcagactccatttagtcctctaaaacccatgttgaggcggtaagtttgctagtcaaggagtaaaacgacgaagattagcatttacttccgcccatgcgatagctgtccgtgattgacaagtgctagcacgcagacagaacggagatagcgaaccgctgagtgtgtcgctctgctcgtaaaagcttagaaacctttgaacgaaagggataatgaaagccttgattgcaaggctttttgctttatggtgggtaagtatcagagtgagaaaatttttggaatgagtagaagtgatagctagaaattatcagtttctatttccatttaccctgtgggtacgtgtttgtttccattgacaaggagtttgtgggaatagaaatgtacccaccttgtttgaatcaagtgaagtgtagttgaaggaaatctgttgaaagcaatacttcattttaccgaataagtaataatttaggcaacttcaaatcgattaaaaaaaactattttaaaggttaagagtagacaaaaattgtccactcttttttgcaaactcaatttatcaataaatgaaatgagggaatgtaaaatgaaatattttgaggttgagttagaaaatcctgatgaatttttaaaactacaaacagaagattttgtgaaagctaatcgcttgctactaaggaagataatccagagcgttacagtctatgaagaaaacttcgtcatatcctttaaatctggcatcgaattggaagtatgagtctcattccataacttttatattgaacatatcatcttgttgtgttatactataaattgatataaacaaagatgtaggaggaaccgaaactatgacagcctcaatgcgtttaagataagctggcaataaaaaaagcagaatctatacccgatgataggcttttttgttgtgcttatttatacgatattgagcattcattagttacggtgaggatattggttatttaactatacctttatttaactatgtctttaatatgaatgtttccaaattgtatgtatgcagaccaaaagccacattgtggggtttggcctgcattttttattgcctagaatgctattcaaaatagaaattcaagcaaaataatatgcaggagataatataaatggaaaaatacaacaattggaaacgaaaattttatgcaatatgggcagggcaagcagtatcattaatcactagtgccatcctgcaaatggcgattattttttaccttacagaaaaaacaggatctgcgatggtcttgtctatggcttcattagtaggttttttaccctatgcgattttgggacctgccattggtgtgctagtggatcgtcatgataggaagaagataatgattggtgccgatttaattatcgcagcagctggtgcagtgcttgctattgttgcattctgtatggagctacctgtctggatgattatgatagtattgtttatccgtagcattggaacagcttttcataccccagcactcaatgcggttacaccacttttagtaccagaagaacagctaacgaaatgcgcaggctatagtcagtctttgcagtctataagctatattgttagtccggcagttgcagcactcttatactccgtttgggatttaaatgctattattgccatcgacgtattgggtgctgtgattgcatctattacggtagcaattgtacgtatacctaagctgggtaatcaagtgcaaagtttagaaccaaatttcataagggagatgaaagaaggagttgtggttctgagacaaaacaaaggattgtttgccttattactcttaggaacactatatacttttgtttatatgccaatcaatgcactatttcctttaataagcatggaacactttaatggaacgcctgtgcatatttctattacggaaatttcctttgcatttgggatgctagcaggaggcttattattaggaagattagggggcttcgaaaagcatgtattactaataacaagttcattttttataatggggaccagtttagccgtttcgggaatacttcctccaaatggatttgtaatattcgtagtttgctgtgcaataatggggctttcggtgccattttatagcggtgtgcaaacagctctttttcaggagaaaattaagcctgaatatttaggacgtgtattttctttgatcggaagtatcatgtcacttgctatgccaattgggttaattctttctggattctttgctgataaaatcggtgtaaatcattggtttttactatcaggtattttaattattggcattgctatagtttgccaaatgataactgaggttagaaaattagatttaaaataaacaatattggaggaatatttatgtatcttattttcatgtaactcttcctgctaaaatcgcagggttttccctgcatacaagcaaatgaaagcatgcgattatagacaggaggaaatgttatggaattaatattaaaagcaaaagacattcgtgtggaattcaaaggacgcgatgttttagatataaatgaattagaagtatatgattatgaccgtattggtttagtaggagcaaatggtgctggaaaaagcactttactcagggtacttttaggagaattaactcccccaggatgtaaaatgaatcgtctgggtgaacttgcctatattccccagttggacgaagtaactctgcaggaggaaaaagattttgcacttgtaggcaagctaggtgttgagcaattaaatatacagactatgagcggtggtgaagaaacaaggcttaaaatagcacaggccttatcggcacaggttcatggtattttagcggatgaacctacgagccatttagaccgtgaaggaattgattttctaataggacagctaaaatattttacaggtgcactgttagttattagccatgaccgctattttcttgatgaaatagtagataaaatatgggaactgaaagatggcaaaatcactgagtattggggaaactattctgattatcttcgtcagaaagaggaagaacgtaagagccaagctgcagaatacgaacaatttattgcggaacgtgcccgattggaaagggctgcggaggaaaagcgaaaacaggctcgtaaaatagaacagaaggcaaaaggttcttcaaagaaaaaaagtactgaagacggagggcgtttagctcatcaaaaatcaataggaagtaaggaaaaaaagatgtataatgctgctaaaaccctagagcacaggattgcggccttaggaaaagtagaagctccggaaggcattcgcagaattcgtttcaggcaaagtaaagcattggagctccataatccataccctatagtcggtgcagaaattaataaagtatttggggataaggctctgtttgaaaatgcatcttttcaaattccgttaggagcaaaagtggcgttaactggtggtaatggaatcggaaaaacaactttaatccaaatgatcttaaaccatgaagaaggaatttctatttcgcctaaggcaaaaataggttactttgcacagaatggttacaagtacaacagtaatcagaatgttatggagtttatgcagaaggattgtgactacaatatatcagaaattcgttcagtgctagcatctatggggttcaaacagaacgatattggaaaaagtttatctgttttaagcggtggagaaattataaaattgttgcttgctaaaatgctcatgggtagatataacatcctaataatggatgaacccagtaacttccttgacataccaagtttagaggctttggaaatactaatgaaggagtacaccggaactatcgtgtttatcacccacgataaacgattactcgaaaatgtagcagatgtagtttatgaaattagagataagaaaataaatctgaaacattaaatttaaggtagtcgctggtcagtatagtctgttctggttggcgactccattgttaaagagtataaagactttagattttatgaatattaaaaataggaacagtcaattgaactgctcctatttttctgctaaatatattgtagttttcttatatgtataatgatagattagcggattctcatctacggtacttacttcaaatatgaagaagtgatcgcggttatctctggacttttccttattgaggacaaagtaattcttacgtgaagtcgccattgtttttaggatatcatcagttaggaaggtcaatggaatattcatgttagagtagcggtagaagtcacgttcaaaatcttggtagctctcgctataatagtccatttgtaggtgattacgctgaaactcaagctgattcatagagcacctcctcgacaagttcaatactaataatgtcttttaatttcaaattgatgtgacctgttgtagtttttatcaaaatgaaatctttggtcagacttggtattgttccagtgtaggaaacacgcttgtttttttcaatcacttgaatgcgtgtgcgtagctgcccggcgtatacttgactgaggagtaataatttcttctctagtgataagtcagacatgtacgttactttgtttgtatcatcagagagtgctgatgcatgttcagataggaaaaagcccatccatttttgcatctttgtatcctggtactctcttgctgattgaaatggtaaatatgaacggtcaatcatatcaaatcctttctatgcagaggcaagggtatttttatcaaattgaatcgtaaaaccttgaattcccccacctgtgtaacattctttaaagcgattgattacctcagtatagattatcacagatgagcttgttggcttaatgctaaatgtaaattccaatggtaatcggttttcagatttagcatgtactagtcgtatcgatatttcagttgttttgagttttctctgacgaagttttgaagttgctgtttcaacgattccatgtaaaaatctttcaagcatttcaatatcattacatcctttgctacggatttctgaaaattgtactgtatttttttcttgtttcattttaatccctccaatccacccgcggaatgaccaccgataagtttactgcgttcaatatttctggaaccttcagttaggacggttcctttttgtatggctaaaaaaccaaactgttctctgacaacatcaatagctgtctgaagtctattatctttttcaatttgttctacatcatcaaagagtgatagtagagtatagctttcatctacgaagccactataagatacaccaatttgtctcactgcaccagaggtgtattttttcggaataatacaagtacatgactcaccattgttttggggagatttgcgggttcaattttattctgagcatttatagattttttcatctcagtcctagaatagccaatatgaatagaaacgacagtagtcaatactagggctactgttccgttccacagtatcatttaaaaatcattttcacaccctttcgtctattagtatagaagaaagctctcagcacatgaggagaaatcatgagggatattctcagttgaataagtaagagtataatctacatctccaaagtaggagtggccagttccagcagaaagaccttcataggttttataactgaatagatcgactactttgttgtcgaatttttcctgttcttcaagtaatcctgaggaatagacgacaactttaaaatcaaataagctaaaaacgctctaaaatcattaaattgatataaaaatgttttttattgtcaaaatatacaattaaaaaaatttccagtttttttaaaatcactatctcagatgacaatttaatcaaaatatgatataatacagaaaaagtaaaaataacaaaagtaacttacaaaagtaaaagaaaaaaagtaaatagatagccacggcggatattcctttcattgtttagaaggagttgctgtggttatcgttgttgctgagctaattaattgctcttattacttagatgaagttacttttgttattgaattaattcaaataataataacgatcaatgaaagtactcatcgatattccctttatgcagtttagagcacaaaggaaaatggtactgatttgatcgtttttttgtgtattgacatcctaaaacccagtcagaaccttcagtcatattaaacaaggagataacatgagatttgttgtatataaacattcactagttttaggtgataacaacatcgtgacaaagcaatttatcgttctgaagcacgatgacggcaacttacaatttactgattttcatcgttatgttaaatctacttcaagaatcaagtctatttcagatgatgggaataaacgcttttcttacgttgttaagtttctaaattttatatttggtacttctggacttaaaagtatagatcaacttacacttgaaatggttagagaattttttacgctttatggattatctcagttaccaggagatagagaaaaaagaaagaaaagcaccgttgaaaaatgcgtaaatgcagttcttgacttcttaactctttatttaagtgagcgagagggaaaggctaagttaaaagcagaagaattgtattctacgacaacttttacgaatagtagaggacgggttataaagcgtaaagaaccaaattttgaaatatacgtaaatgatagcaacactgagaaagctatttttcgtgatatgccaaatagtgcttttgagatgttattttctcacatagcacactatcataaagatctactcatggttgtggccttgggagcctttgttggcttaagaccatcagaagcatgcaatgtaagacgtgaagatagtcctctagggccaggtattttgtttcaccaaagtgatgggcaagtatttaagattgagatcgatctacgaaaagaaatacctctccgaagcgatttaaagccaactggacggattaaaaaggaaagacttcaagcagtaccttatatctttctggaggtctttttagacacttataatgactatatgacttatctggaaggtaagaagtatgagaaggattatggacctttaaatcttaacagacgaggaaaagcattatcatacgatgtatactatcaacgatttcgtaagattattcgcgacgaaatgatcccaatcttcttaaaatctgatgatgcagaggttgtcttttttgggcagcttttgcaggagcataatatttccccacatattttcagacactggtacacgacacagttagtattatctggggtttctgaaataagtgagcttatgtcagcaagaggtgataaatcgcctgagagtgcttgggtttatctacaaaacaaaggagaaatcgcaaaacaatatggtcaagttaataatggtgtttttgactatatgaattggcgagcaaatgaactttttggtgataagttagaaaggtaatgtatgacttattcaattaaatctttgatcgaaaatctgttaagtgaactcggaaaaaacgatatacagtataaaggcaaaattagtaagtttttagttgataacaattggtttaatattgagattgatttggataactattctatctcagataaagatgctcaattattaatagaaaaaataaccaattatcttcttggaccaactggtttagcaggaattcagcctatatttaaacaaaaattcccattaacttacaaatattttcagcaatactcagaagatagcaacttatctaaggaaaacatgttttatgttcaagattttcttgctttttatcttaaaagagatttatttctctgtaatgataatgagattgaattgttggttgaagaagcagtatatgcacttgaaaagcaaaaaggcgaagtttttattgattttttaaagtggttaatgaataaaatgagatgtaactatcacaaaagatatgaatttacacctcgatacacattagaacaggagactaacgcttatgagttagacgaatatttagaattactgtattttctttttaatgacaattacattagaaaagaagatatgctttataaagcagcaatctcaaaagactacgcagatacctggctatttctagcacttcattttatatgtgcgctacgtggaacagatttagaacaacttggacatccacaacttcctagaacaccgaaagaagttctaaaatcagttagaagtggtaattggagtagcagtgaggcaagaagaactcttttaagtattacaactcgtttaacttatttaaatattactccaaacaaaacaaagcgaactaaaaatattagtcagattaaatttcaggtccctgagagttgtcaggtattgattggaacgttgttggctatctgtgaagctcattatcagttgaataaagataataatgatgaacctttaattcgacaaataaaagaatataaacgaattaatcgatatatggggaaagaaattggagacttatttcttgaaaggaattttagttctagatctgcaaataaatcctatcttcaaactgttgccatgttagcagatgatgttttgcaagaaaaatctgagttaaatattaaaggctattttttagccgcattagcccgtagccataaaggttcattcgatgaatttgcacaaactacaacaacgtacctaaaagatgcccaactaagccagcttaaaccagaaatggttgcgagagaactatttgaacgaggtgttttatctatgattccatcaatgatcctgacgattgtaactagaggaaagtataaagaattaagtcctagtcaacagactcagatgattaaacagttagatttgacaccaaatgagattgaaaaaacattggctttaagcattcaggcagaagtgaaatcgcaaaaggcattaaagattttggtagaagaagaagcagagcctaatcaacttcttactatttgtcatcgtataggaaacggtgaagccttctcaaaacaaggtgaaagcatgtgtcttttatctgcgcttggaaagatttgtccatatgacgataggcaacattgcatcggttgtcattatgaattacaaacgaaatctactttattgttattagtaggagaattcaatcgtttgaacaaacaatactctagagttcgaactgatttagaaaaaggtaaaattcggagtattttagaagaacaaataaaaccttgtttaactgaaatgttgcaagctttatgcgagcaatatggagatgacgtgttacatgattacgaagaaataataaaggagttaataaattgaacaatcaagctaaactttttaaaattgaaaattattttgaaacttttgaccgtgattgtgttctgcgagcaaaagaagttttcgatgactattttgataaaggaattattctaagttacgattttgatcataagaaatgggaaactacaaatgaatatgccaatattagcctgttttttaacatttctgaatttcaatataggagattttatcaatcattttttcagttgtcttataaggaatttatcaattacttaaaaagttttattgttttctcaatgaaacaacatgttttaaaaactttacagctatttctaatggatattaaacaaattattaaaaatacaaccaaagatacgtttttagatttagaaaatatttctgtaaaatttcctggtttatgtattgactttttctcaaatcttccctgttcagatgatagtcaactaaatcaactattggagcaattagataataaattaactatcaaccttcaaaaaaagcagaggtcaaaacagcaaagacaattagcgcaatttcaatcctattttacttttaatgacattttaaatgattattggtctcaaacattatctaagaaagaacgtctattttattatccattgtatctctggtggcagattacagcaattttacctttaaggccaagagaatttcttttaatacaaagaaactgtttaaccgagaaagatggaaaatattttcttacattaaggagaaatataatcaaaggaagggatcgacttgttgcacataaaatttctgaagattatactttgaatacttatgaaattactaattcattagcttctgaaataaagacttacctcaaacttacggaaaataataattctactaaattagatacattatttgtgactgatcctcattataaccgttggggtcgtcgaacaggtgttaataaccgatttttaacttacactaatctcaatactattttgaggtatttttttaatgagattatttctcaaaaatacggttatcaagttaattattttagttttccagctagattagatgaaaacgagattaatttgattcatattggggatacgagacacattgcaatgatcaatttaattgcagaaggggctagtcctgttacagctatgcttttagctggtcatgaagatgtgacaacttcatctcactatttttcaaatttaagccaatttattgaatgtcgtagttatcaaatgtatcgtaaactaacgagtaagaatacgaattacaccataagtaagagacagccattttatacagcacaaggacaatacatcactttagaaaataaaggacggtgttactcaccccgctttgcgaaaggtgattattcagattgtctgaaagttattagtgagcatgcagaactaggtgcttgtacgagctgccctttttaccgtaaagcaggtaaagattatttttcaatggataaaacatttaaaaagtcagttgatgaaaaagctatggttgtagatgaagcgattagaaaagttaggcaagggaaaggtcatattgaagatattggagaagctttgttgaaattaaaaacagttagcaatacctatcaagattacttaaatgctaaacaactatctttagaggagaataagtctaatggctagaaagaaatcaatttctgatgatgaattgattcatttgtttgaacagtatttaatttcccagtgttcctgtgatttaagcttggtaaaaatccctcggtttggtgactatgttaggaataatggctatcaaaatgttgcggatacaaccattagacgtaataaaagattcagggattttttaaaagaaagtgaaattaaataccaagatgaaaattatgaagctgtaattacttataagaccatagatcctgacaattttatggcaaaaaatcgtgctccaggtgctatgaaaagagcattggtggaaattagccaatactacaagaaaatagcaaacattgcggccagctataaacaagaagcagataagttacgtagtttaaattctgaactacagtcaactaatgaagatttaaaacagaagctacaaagagaaaatgagttaagtgatgagaatcaaaaactattacaaataatcaaaacaagtgtctatccagaaattgcgaatgagcttttaaaagaagaaggattgttaaaatattctcaaaaggttatcagtgaggatttcctagcagacaatatcatcaccgctgattcagaaatagattttcattctggtggtcttattgaacaagaaaatcctcaaaaatcaactaaagtggtttctattaaaaacttactagacagcaaaactaattataaatgaggaaagaaatgaacaagaaagttaaagataatccagctatttacatgtactgggatcaaaaacgaaatgttcttgaccccaaaaaattatcgtcaaatagtttaaaatatgcctattggtcttgcccttattgtcaacaccattgggaagcgaaaatcattgatgtgcagcttgacagttatgaatatcttaggtgttgcccccattgtggattaggtgaacgttccattgatgaaaatgagagcgtccttcaggtttatcccgatttcagaaattatataaactacagcattgagcgagatgaagaattagatgagaaacttcttaccttgccgttcaatagtaaaagaaaattcaattttaaatgtccgacgtgtcaattaagttggaaagattctgcgacaaataagaggttatttcaactaacaagtggggatttatttcattttggctgcaatgaaacttcctatcattgcgattacaaatcaatttatccaaatttagctaaaatctatagcgaacatttaaacaaatttaaatttaacgaactgaagctgagttacaatataacagtacctatccattgggaatgtgataagtgtcattgcaaatttgaattatctattgatagattattgaaccgaattaaaagaagtggtcattactgtttggagtgtcattcttcatttgaagagttattggataaagattttgatgtttctcctctatcttttttaaattcttccatgctcaaggagtggtctaaaaggaacaataatacacctaatcaagttgatgtattatctaatgttcatgtgttatgggaatgtacgaattgtcacggagagtattcatgctcactatttgaaaaaacagataggtcttgtccattttgttcaaatagagaaaaacttcaggattttaatacactaaatgaaacacatccctatttgagggaattttgggacctcagtaatgaaagggatttttccgaatattggtttaagtcaaataatgtagttagttgggtttgtccttgttgtaaaatcaactttcaatgtagcccagccgaaatgatcagtcgaaccgatttagaaaatcaaaactttcaaacatgtcccaatcaatgtgactggaggactgaggtatttaaaaataatattttccttaaagaaccaaaactcatcaaagaatggagcgataaaaataaaattcctattcatttatctcagacaacaatagaaacgaaaaaatattggtgggattgttcaaagtgtcatgggacatatttatgttctatcccaattcgaagagaagtttctcagtgttgtcctttctgtaacaacgataagcctctgaatgggtataatacatttgattatttgtaccctgaactagcaaaattgtgggcaccaaataataaagtctcaatagatagttttgttccattattaactgaaaaaaggttttatttatggcgctgcaaagaatgtaacttcgaatttcatgagcgcttcagcattatattaaataagtatttaaattccgagacaaaagatcttaaagaaatgtgtccattttgtgcagaattaaaagaaagacaagataatatctcatttgaagatttgatgaacgagtgggactatcttaacaatcttattctaggggatccagaaagaatcccaaataatacgcaattaagattttggtggatttgtaagaataatccagagcatcgttatagaatggctattgtagataagattgcaaatgtaaaacgatctatcgagccatgcatattttgtaaagggcgtagacgaaaaagagaacattttgttccttataggaaaatttaaaaaacaggttcaaatttgaacttgttttttatcatagatttttataaagtacattattttaaaagattgtatttttagttttcaagtagatagtgtacagaattttagtatgcgaaagatttagttttcacgggaataaagtacattatttcgagaaaaattttttccagttaactcaaagaacccctataacatctttccgaaaaactataattttcttgaaaaatatatatggctatgctatactactagtatagaaagatttggagaaaaacatgaaacgcgagatcttattagaacggattgataaactcaaacaagtcatgccctggtatgtattggaatattatcaatcgaaactggccgttccctacagttttacaactttgtacgaatacttaaaggaatacgatcgattttttacctgggttttggaatctggtatatcggatgctgacaccatggccgagatccctttagacgttctggaacacatgaccaagaaagacatggaatcctttattctttacttacgtgaacgtcctctgctcaatgccaatacaacgaaaaacggggtttcccaaacgaccattaaccgtactctctctgcactatctagtctctataaatatttgaccgaggaagttgaaaacgagcaaggtgaaccgtatttctaccgcaacgtcatgaagaaggttgctaccaagaaaaagaaagaaaccctggcggcccgagctgaaaatatcaagcaaaagctctttttgggtgatgaaacagaaggttttcttaactatatcgaccaggagtaccctcaaacactctcaaatcgcgccttatcctcctttaataagaataaagagcgagatttagccattatcgcactccttcttgcctctggcgtccgtctctctgaagccgttaacctagaccttcgtgacctcaatcttaagatgatggtgattgacgtcactcgaaaaggtggaaaacgagactcagtcaatgttgctgcctttgctaagccttatctggagcaatatcttgctatccgagacaaacgttacaagacagaaaagactgatacagccctctttctggccttgtatcgaggtgttccaaaccggatcgatgcttctagcgtggaaaagatggtcgccaagtattcagaagacttcaaagtccgcgtgacaccccacaagcttcgccatacattagcaacgcgtctctatgatgctaccaaatcacaggttttggtcagccaccagctgggacatgctagcacccaggtaacggacttgtatacgcatatcgttaatgacgaacagaaaaacgccttggatagtttataaaattacataacgtaaattatgtaatatattagttttaaaaagagcgatagattttttgaatgtctaccgctcttttattctttctataaaaattcgatccaataattacggtgtggctcaataatgactggttttccccagaatgattttagataagccaagtttgcaggggtgaccggtcttttttcaccattgtacttctcagcactttctttcgttagaaagcatttaacagcttcatatggtgtaccatcgctcgctattcgatcaattcctaaataagcaatttcatcaccggcttttggaaaatctgtaaatagtttaccaataaaataaaccgtcttatctttcattaattcataagccttactattttccagtctgttattcgctgcagcgtacataatacaaaaactatccacaatatctttcaaaggcattaattcttctttgctgactataatttcgtcgggagcaagtccaccaatgattaaattttgataatgaggttgctggatgatattatctaaagccattcctaatggtagtttgacagcttgatagcctaatggttcgagctcttgctttttctggtcaaggtgttcttgtgtaatactgacattcaaatcataaggacttgaagattgttgctttctaaaaaaagccacgactatacgatctaactgttcaaatagaccaagattttccactggaactctcatcatcgaatataatccccttttgtgttcagatttcctctatattgtacactcatagttttcgaatatcaagaaaagagaccgtgtcatgaactaacttacgttttacgactatattttctcaccaggcataatttttctcaccacacgtagccattgctgctaacaactcctctggtgtcagcttcttcaaacctccatagctaggatcctgtacatgtgtatcggggtctaaataatagattgctgcgatgtccttgccatctactgtcaattcatagccaactccaatcacattatgttccccactttttccaggatagatttgagcaacattaaaggtgtaatagagagggtacccatcatcaatatctttgcgaacgcgttctttaaagaagcggatatcttccgaatcaggactaccatctgtgacagtagctagtcgataaccagcctgatttccacttggttctggatagccaaatagattctgattcaagacgcgaatggcatctcgattatgagtcccatagggttcaaaagtccccatttccttagccaattgatgttgagagacgctaacccctcgactagccaggatcatttggactgtcgcaggagcacagaaataccattcttcttgaagttttaaagaaataggcaatagttttcggattccttgattctctttggacgatgtttcttgtgtgaccgattgagaaggtttcgtattctctttcaatgaagcttgttcctcgcttgaagatggcaatgtttcctgaccaccggcttccgtattgccttccttaatttttaatcgctctgctacctctgctggcattggtggattgggttccgtacgctcctttgtttctacactgactcttgttgatgaagcagatgtgaccttacgagagctggaaggacttgttttactttcttttggtgtctctgtgcagccagataaaccaagcaaagtcagaagtacaaggaataaatgaacttttttcatgatttttctcctttaagaaaacgatcacgagactaaataaaattaggatacagggattagcaaatacacttttccacctttactatactacaaaatccttcgtaaaaccataatttctatgtgaaactagtttcaaaaaagagattcgctactgcgaatctcttttgactttattccaccactgcctcagcaatttcttctgcagtgatacctgcaaagtaacgacctagattaatggtttgaagggctttgaggacgtcttcacgttcgtatttaacgccacgaagaacatcttctactgctgcaacatcttcgataccaaagaagtcaccgtaaatcttgatatcttgaatttttgattcaatgacattagcgaagatttccaccttaccgcttgtgaattttgtgccacgacggacattgaattcaggagacttcccatagttccaatcccaggtaccgaacttggtttccttgatacgattgatttcagccaattcttcatccgagaagacatattctgtcatctcagggtattctttcttcatgtagtccaaaagtaggtcacggaactcttcaaccgtgattttttctggcaactcatcgatgatattggtcacacgagcgcgaacggatttaacccctttagactcaaacttgtctttagacaccttgagagcattagcaaggactgacaaatccacatcaaagagaaggcaaccatggtgcataatccgaccattgatgtaagcttgggcatttccacagaatttcttaccatcaatctctaagtcattacgacccgtgaattcagccttaaccccaagttgagccaaggtgttgatcacaggagtagaaaaacttttgaagtcaaaggctttgttttcatcttcttttgaaatgatggtgtagttgaggttgttcaaatcgtggtaaacagccccaccaccactgatccgacgaactacttcaataccatgctcccgaacgtagtcgcggttgatttcttcgatggtattttggtggcgaccgacgataatggatggtttgttaatccagagaaggaagatttgatcctcatctaacagatgcttaaaagcatattcttccaaagcaatattaaaagcagtatcatttgaataattaataatgtatttcataagattcctttatatatgatagagactggtccagcatttgctgtccagccattctatcatttcaaatactatttcttcttaggtgaatgaacagccaagccaagtacatccgcaaaggcttcgtacatcacttctgagaaggttggatgaccatggatagtcttgagcatttcttctacagtgatttccatctcaatgatggttgaagcttcgttgatcaattcagctgctgctggaccaataatgtgaaccccaagaacttcaccgtatttcttgtctgcaataactttaacgaatccttgagccgcatctgatgcaatggcacgaccgttcgccgcaaagttaaacttaccgatttgaacatcgtatttctcacgagcttgttcttcagtcaaaccaacagctgcaacttctggaagggtgtagatggctgcaggagtcaagttcaatttggcaacagcatgatttcccttaagagcattttcagccgcaacttctcccatacggaaggcagcgtgagccaacatcttggtaccgttgatatcacctggcgcatagatacctggaacagacgtttccatgtattcattgaccttgatccgtccacgatccaattcaaactcaacttcaccgataccttcaagatctggaacacgcccgattgaaagaagagctttgttggcgataatatcatcttttccttcaaccttgatacggagtttgctatcttcttcaatgatttcttgcaatttcgtatcagtcaagattgtcatacccttgcgttcaaggatcaagcgaaggttcttagatacttctgcatccatagctggaacaatgcggtccatcatttcaatgaccgtaacttttgacccgaaggtcatgaaggcttgaccaagttcgatcccgacaaccccgccaccgatgatcacgaggctttctggaacttcgttcatttcaagaatatcgtcactcgtcatgacaagggatgattccatacctggaacgttaatcttgctgactttggaaccaccagcaaggatgattttcttcgtttcaagcaattcagaaccattaaccaagacattcttatctttcgtaatggtaccgatacccttgtgaacatccacaccgtagctgcgaagaagacccgcaacaccaccaacaagggtattaacaactttagatttagtttctaaaagtttatccatatctactgagaaacttggattttcaatgataataccacggttggctgcatgtccgatattttcgataatttcagcgttgtggagatatgtcttagttgggatacatccgcggttcaagcatgttccaccaagttcagatttctcaacaagagcaaccttaccacctaattgagctgccttaatggcagatacgtaaccagcagggcccccaccgatcactacaatatcataagcatcatcgctcttattgtcatcgtttgaagcacttgctgcagttggtgctggactcgtttctggtgctgctgctccagcggttgggatgttttccccttcttcaccaaggtaaccgatcacttctgttacaggaacagtttctccatcccctttcaggatagcaatcaagtaaccgtcttcttccgcttccaactccatgctgactttgtctgtcatgatttcaaggagcacttctccttcttttacaaattcgccgacttttttattccactggacgatttgtccttcggtcatatctacgccggcttttggcataattacttctaaggccattttatttccctctttttcttgtttctattctctctcgttgattagaccaacattgaaatcgggtcttcaatcaaggctttcaagtctttcatgaatttggcaccagccataccatcgacaacgcggtggtcaatggtcaagcccaagctcatgattggacgaatgacaatttcaccatttacaacaactggtttttcaaccgttgcactaactccaaggatggcagagtttggttggttgataatcggtccaaatgattgaacgccaaacattcctaagttactaatggtaaaggttgagttttgcaattcacttggagcaagcttaccatccaaagtacgtccgataacgtccttgaaggctaccaccaactctgataaagtcatcttttctgcgttatagacaaccggtgtcatcagcccattatccatcccaactgccatcgccaagttgacatagttgtgagtgatgatggttttgccatcttccgtcaatgacgcattgatgtatgggtgtttcatcaaggtcttaacaactgctagagaaagcaaatctgttacagtgacttttttgccagttgcttccatgattggatccaatactttcttacgaagggccaacatttgagacatatcaacgtcatagttcaaagtaaaggttggtgctgtcaagtaagattccaccatccgttgagcgatcaccttgcgcattggtgtcatcggaatccgctcaatctcaccataaggtgtcacattatctggaacttcttccaccttctcgatttgagccggtgacttaatggtctcattctcaatattttcaggaaggaaagcaaggacgtccttcttcatgatcttaccacgatgaccagttccttgaatctcttgccaagcaatattgtgttctaaagcaattcgttttgcaagtggtgaaatgcgaaccacatttgtgtctttataggtttccacgtcttctttgtggacacgaccgtttgcgcctgaaccagaaacatcatagaggttgatcccaagatcatccgctaattttctagccgcaggagtcgctcttagcttatcatcagccatgacctctcctattctatactaagatatcagggacgcagaggacaaagaaaaaataggagattgacgctgtgttcgatgaacacaaggaaatctatctttttttcacagtcctccgtccggattcagttataagatactaagggcgtcaaaagtcaaagtgaaaataggaaacttgacgaagaaactttagtttctatgaaagtttatctttttcacccagactttagcccgtgctctaatctaagatattaaggacgcagagaactttgtacctaaaaagatacaaagtttcctcgtctaattcaaatgacattacataatttatgttatgtactattctttattgtacgttttacgaatggcatctttgatgctttcaactgtcggaatcattgcattctcaagattttgtgcgtaaggcattggcacatcttcccccgcacaacggcggatcggtgcatccaagtaatcaaatgcttctgattcagaaatgatagctgaaatttcaccgatatagccacttgttttgtgggcatcattgacaaggactacttttcctgtcttcttgacagaattaatgatgatctctttatcgagtgggaccaaggtccgtgggtctactacttctactgagatgccttcttctgccaattcttcagctgcttgcataacacgacgaagcatttttccataggttacgacagtgacgtcagttccttcgcgtttgatttctccgacaccaagtggaatcgtatagtctggatccactggcacttcccctttttggttgaattctgatttatactcaagaatgattactgggttgttatcacggatcgatgacttgagaagtcccttcatatctgctggagttccaggagcaacaactttcaaaccaggaatatgagtaaaccatgattccaaggattgggagtgttgagctgcagatccaactccgttaccagcagcacagcgaatggtcatcggcacttgacctttaccaccaaacatgtagcgagtcttagcagcttggttaacgatagcatccatggcaattactgagaaatccatgaaggtcatatcaacgattggacgaaggccagtcatggctgcaccagctgccgcccctgaaatcgcagcctcagaaatcggacagtcacgaactcgttctggtccaaattcttccagcatccctacagaagtaccgaagtctccaccgaaaactccgacatcttctcccatcaacaatacattttcatcgcgacgcatttcctcagacatagcaaggataatggtatcgcggaaagacattaatttagtttccataattctctactcccccttagtctgcgtaaatatcttcgaaagctgattcgagtggagggaatgggctttcttccgcaaatttcactgaagcttccactgcttcttttacttcttcttggatctgatccaattcttctgcgctcgcaatctcattttcaaggagatacttgcgaaggttttcgattggatctttcttcttccactcttctacttcttcacgggtccggtatttaccaggatcagatgaagagtgaccaagccaacgataggtgacactttcaatcaagacagggcctttaccagagcggacgtgttcaacagcctttttaaatccttcatagacatcgataacgttgtttccatcaggaataaacattccaggaatgccgtaagcagcactacgttcgtggatatgctccacattagtcattttcttgatgtcagcagagattccgtaaccattattgatacagtagaaaataactggcagattccagattgaagccatattgaccgcttcgtggaagacaccttcgttggttgcgccgtccccaaagaagcagacaacaatcttgccagtcttatgcatttgttgagtaagggctgcacctacggcaatccccataccaccaccaacaattccgttggcaccaaggttacctgcatcaaggtcagcgatatgcatggagccgcctttccccttacaagtaccggtatacttaccaaggatctcagccatcatgccatttaaatcgattcctttagcaatggcttgtccgtgaccacggtggttagatgtcagcaaatcatcgtcgtttaaagccaacatagctccaacattggctgcttcttccccaacagaaaagtgcgtcattcctggcactttccctttttttactaactgtgcaatttttaagtccatacgacggatttcttccattttacggaacattttcaataagagacttttatctaatgttgccatcatttcgcctttcttagcatttattcattctctttcattctagccaaaaatgaaagcactgtcaaaaataatgctcatataatttcacaaactttattccttggaagaaggttttataagctttttaaaatccaaatacaatttttcacaatcttttctcttcttcctttgctatacatataaaaaaaccgataagatcctatcctaccggtcgttatcttatgattggcgttgaccaaagtcatgaatcatttgttccaattcttcacgactaggtgttgtaagcatatagaggtaatctccctgaagttccgcaaaggccgctggcatgtctttcttgacgcggaattgatcatggtatttagccaaaacttcttcctctgacagagcataagctgcatttgcacgacgagaagttgccaagcaataaaggggctcaaactcagaagctgggaaagtttctcctgctacgatggcagcatagccacggtacaaatcaatcgagtgagcgtagttgtagacatcgatagtaaagccacctgcagggcgattattgtactcgatcgcaatatagtcatccccatcgcggaagaactcaatgtggaagaaacgttccttcatgccaaaagctttgacaatggcttccccgtattgacgcaattttgaatccatctctttgaggacataataagaattgtccatcttgtagagcatcaaatcgagtggcgtataggcatagtcaaaagtagtcgagaagacaatattaccatcgcgatcgaccagaccatcaaaggtacaaatctcgctagaagtgacgaatttctcaaagaagtactcggtatggccatcccattctgccttgaaatggtccacatcttctgctgtttcgatcttgaaggtcgctgctgctcctaccccattgtcaggcttagcaatcaatggcaacccaatcttcttcacggccttatcaatgtctttttctgttttaaccacagcacccggaacgactgggactccagccttcttgaagagtttcttcatttcggatttgaacttggttttcttcaaatcttttggcttggcaccaaagacattgaattgctcccgaagcgccgcatccaattccaaccagtattcattgtgggattcgatacgatcgattggaccgtgtttgtagaaaagaaaggctactgcacgcttcacttcgtccagattttctaaattttcaacacggaaatattctgttaagctgttgcgcaatggctcatctaactgttcatatggctcttgaccaattcccaagacagtgatccctttattagccagttcgattgtaaattgttggaagttttgtgggtaatatggtgaaataacgatataattcattgaggtctcctccctttttacttatagatgcatttggcctaggaaataaggcatttgtttgcgccaccattcccaatcgtgggctacatcatgtccccattcagcgaaccatgcaggaatatttttgtgatcaaaggcttctttcagtttgtagaaagagggaagcccgtcttgttcccaagcccctaaaccagtacaaacaacgatttcagcctgacggtaacgatcgataaaccagccatcgttttggttccaaatataatcagatggcgagttttggtaaatggcttcatcgcctccaaagtcaccaacaaagaaacgagcgtcatagacaccactcaaggcaatcactttgttaaagacatctggatgttgcaagaagaaattaagtgcgtggtaggcccccatagagcaaccagttgtcatcatcggatcaaaccagcctgttttgtgtttgataaaaggaatggcttcttcaatcacatagcgttcataagctcggtgcatttctgctcgatcgtgaggattcttccaattacaaagccagctttcactatcgacactcgaaagggtgaagaattgaacccgtccttcttcgataaactgagcacaagcatcaatcataccaaagtcatagtattcgttatggcttccacctgaggaggcaaagaccacaacaggaatccctgcgtgcccatagcggttcaaatacatttcacggttgagttggccactccagtggcttaaatgttcaatattcataagttccctctttcctttatttctttaatttacagtctattaatcccatttttctgccaaaaagcgaaggcattctggtaaatgttcggcccatgcttcttcgtggtgaatagccccagattgaatccgaatggcaatattttccaaagccaccccttgttgaatgacatcgtgatagtaacgaagggatgagtcgatgtaggcttgcttgatgtttcctgccatcagcgttttatccgtatcatccgcctcttcagtcccaacataaatgtagatccgttggtctgcatataattttttgcgttcgatataatgattgaaggcatcttgatgcagccagttagcagaggagaagactcccagacaaccgatttgatcttggtattctaatcccaagaattgggtaatatttccacccaaggaagatccaatcatggccgtatgttctcgatcagcaagagttcggtattcttggtcgataaaaggtttcaccacctccatgacaaattcgccgtactcaacgcccttgccaccaaattgcatgccaggaatattagattccttgtacttccaggcagagtattcattcatccgttgcaaaccatcgttatcaatcgcaacgacaatcatgcgactaatatcgggattccgcttaatggctggaatcaccttccaggaatgacccgcataggcctccttgctatacaaaacgttttgtccatcgtggaaataaacaacagggtaacgtctgtctgtatccgtttcataattcttaggtaataagactcgcacacgacggagttttccggtataaggcactttcaactcgtgtgtcttcatatctaaataaaaataggatttgttcattgtcagaaaactctctatattctaaattttattcattataccatttttagaagaaaaagtctggattttctccaaactttttcctttcttgggttatttttccataaactgagccaaatcttgtaaagaacgttcggcaattttctcataccgttcctttttatcccgaatgcgtgggccttctagctccttgataatcccgaagttgacattcatgggttggaaatgtttgctgtcagcatgggtgatatagtgagccaaacttccgatagctgttgtttctgggaaaatggccgcttcttctcctttgaaaaggcgagctgcattaatcccagcaaccaaacctgaggcagctgactcaacatagccttctacccctgtcatttgacccgcaaagaagaggtttggttgtttcttcgaacggtaggtttgttcaagcaaatttggagagtccatgtaagaattgcggtgcatgactccgtatctgacaaactccgcattttccaaacctggaatcatttggaaaacccgtttttgctcaccccatttaaggtgagtttggaagccaacgatattgtagaggctagcagccgcattgtcttggcgcaactgaacgactgcgtaaggtgtcttaaactctccatcacgtggacctttgtaatcatctggatactcgagtccaactggcttcataggaccatagagcatggttttgataccacgtttggccatgacttcaatgggcatgcagccttcgaaatacttttctttttcaaaagagttgagcggggcttcttccgcattgaccaaagcctcatggaaatccataaactcttgtttggtcatgggacagttgagataagccgcttctcccttgtcatagcgtgacttgagatagaccttgttcatatcgacagtattgacatcgataataggagctgctgcatcatagaaatagaagccatctccaccattaagggcatggatcttctctgccaaggcatcactggttaggggacccgttgcgaccactgtaatagcatctgtcggcaattccgtaatttcatcacgaatgacttcaatgagagggtgttgggacaccttctccgtcacccggctagcaaacccttcccggtccactgccagtgctccaccggctggtacacgagtcgcttcagctgcttcaaggatgacagaacccagacggcgcatttcttctttgaggagaccgacagcattggtgagagaatccccacgaagagagttggaacacactaactcagcaaagttatctgttttgtgttgcggagttgatttgaccccccgcatttcgtaaagcttgaccggaataccacgttctgcgatttggtaggctgcttccgaacccgccaatccagcaccgataacattgatataagattgagacacgacactaatacctctttgggtatcaaaacacccttctggactgtttgacacccacaaatctttctaattttctacttggtccattataccaaaaagccaagtaaaaagacagggaggcttttccttcctgtctagactttaactaattattttcttataaacacaaccaagctgctaagagggcagagaggatactgaataaggacccgatcaagtaatactccgcaaaggctggattttccgaaattttattgtagcgagcgatggacttggctgtaaagactagaccgatcgaagcaaattgcccatagacgagacaggcgccaatcaccaaacgctctaaaaaaccaatcatagaaccagccccagtgatcgtatccattttcttcttgctggttggttgatacttggcaaacagaattttaaaggcaatattgcttggtttcccaactaggaggacataaaagattagatttaaaatgtccaaaggcagataggtcgaaccattcttcgctcctaaaaggactagacagctaatgatgctgatatgcaagacttgatccaatgcaaaaatccaggcggttggtaatttcaattgcttctgcacgataggtttcaagaaatctattgcggcatggcttattaaaacgactaagcaaatccaccacaagtctagatgaaagagcgaaacaatgaacaaaggcaaagccacatacagaatgtgaagcccgagcaccttcttatcctgatccttgcgatccgccatcttctgactttgaaaataataatccgataacaaatgacaaatcaacaaaagaatcaagtatggattcgttacgatactagacaatccgctcatgggcctctcctttctctaatctttgaatacaagctagtgctgctgctcgtccccgtaaataaacacgaatactactactctttaagcgcttggacagggcacttgggttaagccccagcgattgggccaaatcttgctgactaaagttttcactatagacagatctctttagcagattgagcaggatctcttcctgactctctctccagcccgaacgtatggcctctccagaagcgatgagcgcattcaccactaaatcctggctgtcattaccgctcaaaaaatagatctgggtattgccataatcatttttctgatggaccagattaatggctgcgcgtgcattccaataggctggtccatctgcaccgatactttgcagaggatcaatatccgttacaatctccccgaggccaatgccgaaacgaagttgagtcggttttagttctgaacgcaaggtatcgataatttgaaaaacgggagcctctactttcaaaagggcctgaaactcatcgcccaaagttaaggtaaaagccgatgctaggcagtctttaaaaagctcattgatcttttgaagcgttttttctaactgtttttgcaggtcaaaacgttcttgtacgattttggaatcaatcacatctgcaatcaaagcaagatacataagcccacctccttgtgtctattataacgaaaaaaacaaaaaatgtctattataacagacatttataaaaattgccgttataatagacattgaatcgtttgaaagcttatttcactttttcttcttcgtagtcgccattgctacatacgacttgtttgccgccaccacgaacttttttctcaactaagtagtggccacattttggacaatcccgaccgatcggcttatcccaagaggtaaattcacactctgggtagcgattgcatccatagaagatacggttgcgcttggttttgcgttcgatgatttgtccctgatgacactcaggacactccacgccgatttctttgacaatggcctgggtatgacgacaatctgggaaattgctacaagcatagaactttccaaaacgtcctaatttaatcaccatcgggcttccacaaacttcacaatcaaaaccagctggttcgtctttaatttggattttttccatctcttcttcagcctttgcgacctctttagaaaatggtttgtagaaagcatcgatgaccttttgccactcttcctttccaagttcgacatcatcgagtttcccttccatctccgctgtgaaggtcacgttgacaatatctgggaagaattcaacgatcagtttattgacgatctcccctaattctgttggttcaaagcgtttggctaccagcttcacataataacgtttttgaatggtctcaatcgtcggtgcataggttgaaggacggccaacaccgttctcttccaaggtcttaatcaaagtcgcttcagaatatcgagcaggtggttgggtaaagtgttgctcaggcttgctattgacttgcttaacaatatcgccttctaccatatccggcaacatcttgttcttatctgagtcgttataaatagccaaataaccatcaaacttcacctggctcccatttgccgtatactgaaccccattttgacctaaacggacattcatggtatcaaagacagctgctgtcatttgactagctacaaagcggttccaaatcaatgtgtagagttttaattgatctttgtccaagtatttagcaatgctttcaggtgtattgaagacgctggatggacggatcgcctcgtgggcatcttgggcaccagaagcattcttcacacggcttccatgcttggaatatttctcaccaaagcgatccacgataaagttagccgcctcattttgcgcaactggactgatccgtgtagaatcagtacgcatataggtaatcaaaccttgaacaccagaaccaatattgattccttcatacaactgctgggcgaccatcatggtcttacgtgtacggaagttgatcttattggcagcatccatctgcatggaagaggtggtgtatggaagtggcgcattccgacgacgttctttcttttcaactttttcaacggtaaaatctttgccatctaagtgttcaagaacagctttcacctcttcattggtgttgagcttcatcttcttgccatcaatcccatagaagctagcttggaattgcttagtcccttttttaaagacaccatcaatggtccagtattcttccggcttgaaatcattaatctcattttcacgatcaatgattaacttgagggcaactgattgcacgcgccctgcagaaagtccttttttaacctttttccaaagaataggcgaaatggaataccctacaatccggtccaagacccgacgtgcttgttgggcatcgaccaagtccatatcgatttggcgcggttctttaaaggcatttttaacagcatccttggtgatttcgttaaagaccacacggtttttttctttggcatccaagttcaaaatatgcgctaaatgccaagaaatagcttctccctcgcggtccgggtcacttgcgagaaagacttgtttggcttttttagcttcttttttcaaatcattgatcaagggaccttttccgcgaatattgatatactccggttcatagttattgtcgaagtcgatcgacatcgtagattttttcaggtcccgaatgtggccaacactggccatgactttgtagttacgaccaaggtatttctcgattgttttggccttcgcaggagactccacaatcaccaaatttttcttggttgtactgcttttcttttttgttaccacgttttatccctctgtattgtataaatctcattgagtttaatacattttaagaaagatgtcaactaggaacttctcctataggaaaatcacaatttgtatttcaattcatcaagaatgtcctggcctgaggtgacaagttttgcgccttcttgaatcaggtgatggcagcctgcagatttaccatctaaaatatttcctggaatagcaaaaacgtctcggccttcttccatagcacgctcacaagtaatcaaactccctgaacggagtcgagcctctgctacaatcactgcctgacagagacctgcaatgatgcgatttctctcaggaaaatgaaacttaagaggggcctgccctggtccatactcactcaagatcagatggtgttcccccatatgtgcctgcagtctttgattgctcttaggataagagacatccagtcctgttccaatcactccgatggtcttgccaccattgcggatactggcataatgagctgtcgcatcaatccccttagcaagtccactaacaatgaccagttcatttccaagttccttaattatcttctctacagaacgaaccccttctcgcgtggtctcgcgagctccaacaactgcaatcttcggtttgcttaacagttgcaaatccccttggtaaaaaaggagtacaggaggattgaagatctgtagcaattcctcagggtattcaggatcaaaaatggatagagatgggaaccgttcaaactccttgtgtaaatgctcttcatccagctgccggtatttgtctacaaaatgaataatactgcgacagcgagcgatccttgctatctcttctaagcttggtaaggcttggtctttcctacagtagtccaaaactctcaagacttgctcatttgataaaccagcttcttttaatttaaagatttcaaatttctccatggtcaccttctacttcctctcacttatttattcgaaaaagaatggaaaaaaagctctatttctagaactttttttgatatgtagaagaataaaagtaagatgcggcaccaatcaagttgctttcattatggaagcgagccgcttggatcggcaaggcctcaaattgtttatgccctttttgagagagtaggttatggtattgtcgactgatctcatcgatcagtagcggttggctactaatgccccctccaattgtcaccttctcaagcaggagcaatgattgaagattaaaaatcagaatagcaatatcatgacaatactcccgaaacaaggatttcagctcctcatggcctccttgatcaagagccttgaaaacggctataccatctgccttttctaggtttaagatgtgactagccttctcaacaaattgaacagctgaaccggtgttttccaaaagattggaaataccttgcaaaaagagttcacgatgaaagcggcgattttctggtgttctttctgccttatcaatagaccgaatgtattctgtcagttgccatcctctcaatagatcaccgttagaaagaagagcaaggccgactcctgtccctaagaccaaggtcgcaccgcaagaacaatcttttagattaccaagccttgcttctgctagaccagcggcttctccatcattgagaacagtgacgggtacttgaaatgtttgttcgagtctacttgctagaggaatgccgcgcaaatatggaatgagaccacctcgaaagacaaagccaaggctcttttggatctcaccggggcatgaaatggcgattccctcgatttcttcccttacgggtgtaacgatttcttctaatccttgccaaaactcctcaatcgtaggtggtgttgggatcttgtctgtatgaaccaattgatagtctgcgtccatcagaccgtactttataaaggtaccaccgatgtcgatagtgaatagcataacctaatcctcacacattgatttgacgggttcaaacgaacgccgatggataggggtcactcccagctggtcgaggccagccagatgcttagctgtcccatagccagcgttctgtgcaaaatcataacccggatattctcgatcaaagtcttccatcatctgatcccgagtcaccttggctacaatagaggcagcagcaatggataaggagttagcatcccctttgatgatactagtttgggaaataggaagatctaacttcatagcatcaatcaaaagatgctggggttgaggctctagctgaccaatggcttccatcatggctagcttcgtagcttcatagatattaacctgatcaatcacgtgattgtccttgacgccgactccgatcgcaatggcgttttggagcacagcctcatagatttccttgtgtttggcttttggaatctttttactatcgttgagccctggaatcttacaagctttcggcaagatcacggcagctgcaacaactggccctgctaacgggccacgtcccacttcgtctactcctgcaatgaggtgaatcccttgagtataaagttctttttcataggctagcattttttccaaacgcaaatcttcgtccacttgtttttggagttcgcgttttcgtttgctgatagccgcttgaacgcctgctcgaccatcaaggatcaactcttcaaataagggatgatctagctcgtcaatcattgccaaacgctctttaacttctttaatcgttgacatctatttcacctacgcgatccagcgtataccgtcccaatttcccatcgcgaacatctttgacaaagagttggtaaaaacggtcgtaatcctctcgaaagcctaatttctgggtcatctccataatgatttcaggagcttcttgttccagatccatttgtttaaaacgttcttgcaaaacagctggataatgctctttaaaatagttaaggccaaaaatggtcacttcatccattggaagcaactgatccttgatggcgcctgttaaagcaagttttaaggccacttcttcatcttcaaacttgggccagagaatccctggggtatccaagatttcaaggtctttattggttttcaaccattgttgccccttggtcacccctggtttatttccaacaacagcaatctttttccccgctaagcggttcatcagagttgatttcccggcattaggaatcccgataatcatggtccgaagggtttcaatctgaatacctcgttccttctgacgggcaattttatcggccatcaaagacttagcagcatctgtgaccttcttaaccgtagattgctctttggagttgatagccaaggttttgatgccttgagactcaaaatagtcctgccattcttttgttgccacaggatctgccaagtctaccttgttcaaaatcattaatttaggcttatcaccaacaattttggttaacataggattttggcttgataggggcaaacgagcatctaccagaaccgtcacaaaatccacgaattttaaattttcttgtacttgtcttctagctttggacatgtgtccaggaaaccattgaatagttgccatgttctccattcctttccagttcaatctcttctattataccatgttttcttgaattctcagccttaaacgagaatacaaaaaatgaagctacctaggtaacttcatttttcttctattctgtccaatttatcaacgatttcaattgattgtccattgtataagtataggtgtcgatatttctagtaaagtagttcttcaagtcattctcatcagacatgctttggaaatcgtacttcttagcatttttctcaaaggtttgaatggtttttccaggttttttatgaacgttggcttttccatggttttcgacctgttcaataaccgctatcttggaaatgacaaaataacttgtttttgatttaccataagatgtatcggtaatagagtatacatagaccaattgagggattttggaatcaaatgtacctccccaatcaactccatctttgattgccgcaaaagccatcccttcaaattttggaaggtctttataattgcggtcagctgcataagcctttgctgcatcctctacattcttagagatggcttcttgtgtatccttatccacttttgacaaggaagtcacataagccccttcctcaaaatcagccaaggtgaccttgtatttcttactgtcttttcctttctcaacagttttaccttgttctttcaatgcatttttaccactttcattgagacgaatctcaatttcatctccaactgcaataggatcattacttgatacttctttaccgttcagataataatcaaatgggaagccatagttagcggttgcttttgcaataatttctagatcttttccttcaaattgagatggttttgataaacttccatttggagaaatgcccttgatctttggataaaaccctttaaagggatcaatacctacaagcgggataagatccgcctccttagttacagatgtaccagtaaagtgaaggccaggtatcatgtcttcaagatcatttttatcgtaaagtaatttgaccgtaattttatcatgattatttaggttcttgcgatcttttacatcgatcagttcatcccctttataaacactaaattctacttttgaaactagctgatcgatattgtagtttgaactctcagtattcaagccttccgcttctaacttcttcttgatatcccggtctaatttttccttgttcaaactaggcgacttctcaacaatagatccttcaccatcagttcctttaatttccagattcacataatcttctaaattaatggtgtcactgctaccacgatttaataagaaataacttgcaagagaaattacagtaagaagggcaaaaatccctagtaaaattcctatcatgtttcttttgttttttttaggtgctggggattgagttggacttggccctaattgcactgtctttggttgaaacgcaacagcttttggttcagcttgggtagctacttgaactttagctccacacttagaacaaaatgcatcaccggcattaataggtgcctggcaattggtacagtttttcataaatcatctccttattgtttatcgagcgtccttacggacagaagtcaatacgagggaagttgcgactataaatagagcggcaaaagcaagcaaggctccccaatttccaagaatcgcaagtagatcataagcataggttcctaccccatctttttgataaacttgccagtcagtatgaccttgagacgggaccatattgttcatgtttgcaatccgaaagaaggcagttgttccccatctcgtaatggtcgcgtgtgagatccacactaaaaatggaattttttcatccaaggattggagaaaatttgaaaacagcaattgaaccatcaatactagcggcatggctgtcatcgcttgagatgatttttttacaaaagctgaaatcaataaggccaacatatccgaagtaaagatgactaaaaacaatgtgatccccaaaaggaatatctggctaccgtttccttggatacgtggatagcgcacaacaatggttccaatcattaagatcgcttccgcaaaacagagaaccaactctgtcagcacgcgcgccgtcacataggaaggcaaggacaagcctttaatttggtactcaaacttgatgactttacgctcgttacaaatactggtcactgaattaaagagaccaatccagagtgctgcagaaataaacataatggaagaagttctcgtaatatggtatttatcaaaaacttcattggcattaaaagcgatcgaaatgatgaaaggaagaagaatcgcttctaacacaaaaaacagagattttttattgagaaggagtcgaaggaattttctaaaataaatcgagacttgcttcttatccagcatggccacctctcctttcattttcaaaccattgaacatattggtcaacaagagctgcattttcagcacctgaaattttatggacgatttcttccaaactctgagcagcaaaaactttcagcgcattgtctacggagccaaagtaacacagtctcccacagccttccgagctctttccgaccaccatgaccttgtcaaagagatgacgaatacgatcgggcgtatgcgtgatgacacataagatctttccttcatctgtaatctctctcaatgtggtcatgacctccatgaccatgctcccatcaacaccggaatccggttcatccataaagaggatttcagggcgcgtgatgtattccatggcaatcgtgagttttttcttttgtccgccagatagagaagaacacttggatcctttgacagattctaaatccagctttttcagaacagatagcacttcttctttacgaagttcaggattgtctgctaattcagatggaccgtagagctttgctgcatcttctagattcttatagaccgtgtcttccattcggtaatgctcgtcaggggattgaggagccagggtgatgaccccttgtttcttcccatcgtttaacaaatcaaccccattaaaataagcactggtatttgaatgaacaagtcctgtcactgcttccataaaggtagattttccagcacctgatccacccagaattaagatcatttccttgggtttaaattccacctgaatatccttgaggatggttttacggtttaagagagttccgactgttacatcttgaatagcaatcgttagtgatgaatgagaaaagttctgacgatccctcggtgaaacggatgggtctgcagttgctgcctgaagatcttggtaaataatctgatctcctaattggacaaccaactgattcgataagactgcacaatcaatcctagcaagcgaggatagatccatcggaaaagcatcttttgcaatggtcttccattctagagatttcatttcaacaatgatgaattttgagcgaaaaacatggccgtcggcgtcacaaagatggataatggaacgatgatttaatataacacgttgatttttcggataggtgacaccatccacctcgatcatcccagacaaacattcaagaaaccattgaccgtttaaaaaatggaaaacagctttagaaggggactgaaaatcatcagccagatgcaaatctgcctgacttccttgagaaataccatcaacgctcaatccatcaaaaagtggaatagctgtaaaatcctgattgagataggtatagatggttgggttttgcatacatgtaaacctttcgaaataaactaattggctagacagtcaaaaccaccctataagggtggttcaaaacgatagctctacctagcgagcactactctagcttagcgaatttgctcaaaatgcaaatgcacggcgatgtgatcaccatagccgctccgttccaaatcacgttgcaagcgataagaaatgtagtgttctgcaatggtaatataaccagcaccaagtaagcggtgctcaaccattgactggatcatgctgatcgtcgcacgttccactttagcttcttccaaatccatggcaactttcttggtcacttgcgccaagttttggcgaagatcatccgtcaagacataaactgtttgtgctgccttcaaaacagcttgatagattttatctgggtcaaattctacaacttcaccactacgtttaatgacttccatcttattctccttgattatcaatatacttctattatcttaataaataggggatttgtcaagaatctaagacatcaataatccgggcgaagaactcccgtaatgatctctttagtagcatggtaatccccatctactacaaccttgataatgcgcttcgcttcttctgccggtgctggcaccaatggcaaacgggttggccctgcttcaaagcccatatagtttaagacagctttgacaggagctggactcggatatgagaagagagcgttgactttagggataaattgacgttggatggctgcagcctttttaatatcattgtgttcaatggcttggaacatctcatgcatttcatctccatttgtatgagaagccactgagatcactccatctgccccaaggttcatcgcgtggaaagcatccccatcttcccctgtatagacgagaaattcttctggcttgtgttcaatcaaataggccatattagccagggttgtacactctttgaccccaatgatatttgggtgttctgccaaacgaagcatggtttcaggcgtcatttccacaaccacgcgtccaggaatattgtagataataatcggaagattagatgcatccgcaatcgctttaaagtgttgatacattccttcttgggatggtttattgtagtaagggacgatagccaatcctgctgcaaagccaccaaaagcatccacttctttaacgaactcaatcgagtcgcgggtttcattggttccgacaccagcgatcaaagggacccgtccattgacaatcttttgaacagccgcaaagagttgtaattcctcatcgtgggtcagagttggactttctgcagtcgttccagctaagagaatcccatctgtatgatgtgccaagaggtgctcgatcaaggcaggaagagcgtcaaaattaatggttccatcttcatggaagggagtgataaatgcagtgatgattttacaatcttttaaatcattataagacatagaaaaacctttctctatataagaaagaggctggggcatgcttgcctttgcctcatgatctgttcataaaacaagttgattcgctaaaaagatgagaaagaaatcaaactcttcgagttactgatttctgtttcgctctctacttcaactcaaatttcaattcagctgttggacgtacgagtccacgttcgtgaagggtttctgcgatttggactgagttccaagcagctcctttaaggaggttatctgaaacaacccacatgtggattcctttttcagcatccaagtctttacgaatccgcccaacgaaagtatcgcgtgaaccgaccgcattaacggcttgtgggtagatttggtgagcaacatcgtcttcaaggactgcacctgggaattctgcaatagcagctttcacttcgtcaattggtgccacttcttttgtttcaatgtagactgactctgagtgagctgacaagactggaatccgcacacaagttgctgaaacggcaatgctatcattttccatgattttcttagtctcgttcgtcatcttcatttcttcataagtatagtcattttctgtgaagacgtcgatttgtggaagagcgttgaaggcgattggatagtgtttcttatctccacctgaaggtaagatttctgctttaacatcacgtggattaactccatcatttaagacttctttcaactcacgttgggtttcaagaatagctcccataccagcacctgaaacagcttggtaagtagatacgatgatacggtccaagccccatttttgacggactggttcaagagctaccatcatttgaatggttgaacagtttggacaagagatgattccgttatgagcatcaagagcatgtgcattcacttcaggaacaaccaatgggacatccggattttgacggaaataagaagtgttatcaaccactactgcgcctgcttttaccgcataaggtgcatatttggcagatgttgaaccaccagctgagaagagagcaatatcaaccccttcaaaagcatcttcagtcgtttcttcgatggtcacgtcttgccctttaaattgcaagacttttcctgcagaacgtgcagacgcaaggtagcgaatcttatcgattggaagagtagattcttccaacattatgatcatttgagcaccaacggcacctgtagcaccgacaacagcaactgtgtatcccatagtaaatcctctttcaaaattttctaaaaattgagtatttgtactattatacaattttttggcataaatgaaaagtaccaacagtaggaaaaaatcctgattctaagaccaggatttttaatggttatttatcataaaagatctttaattcaggtcatagttcaaatcacttaaatctttcttaccttgtgtttcttcagcaagaaatggaacttgatggatcccctttacacctgctacgatagacgctggaaaggaaacaatttcttgattgatgtggctgacattactgttaacaattcgcttcgctgcagcaagatcttcattttcgtcagcaatttccttttgtaaggtcaagaattggttagaagacaagagctctggatagttttcaccgactgcacgaatttgtgccaagacatcattttgattggtaataacttggttggattcttggatagatgctccttgacgtaaagcaactaaatcagtgaaaatctgttgttcatgtttggcataggctttggctacttttagcatttccgaaatggtatcatagcgttttacaaggacgatatcaacggttctctttgattcttcaatggtcactagatagcgattgagacgatttcctacactaataaaccaaatagccaatagggcaacaaatatgattaagccgataatgagattcatgatgcttctccttcaaaaattgctgttatttctttaattaaagctagttctctgcataatttatgatattcagataccaaagatagttgatcaatatcttccggtttttggggcgtcggaaagatatagcgatcggtatacaaagaaataaatagtttcttgtctttcaaaaatacacacatggcattttgagaaatttgtcgatcaaaccattctaacatcttaggggtgagaaattttcgggcagacagttcatccgtgcagtaaatattgtaattctcgttattgcgaatatcctctgtttcaatctgaacttcatctcctctggctccaggataaaccccattcacctccctcttaaaaagaaaggatttcttggttggcacaacccgaagatgaccggagaaattgatcggtagacataaagagaacacttgtccaaggaaatctgtaacttctacatgttccgtcctcgtatgtccattagatgtccgataacgagtctccgtatgatgggcatagagatttgacaccgttagctctttgtcatcatgaaacgatagttctttgaaacatagaaaatcagtcgaccgaggacataaatgcgagagagtttcagaagggatggaaccgtcctctttgatcgaagctcgaggaaaaacttcctttaatacaggcgaaaggatatcatcaagatagatctcatcgttcgaacgaattcgatccccaaacaaggcttttcgttttttatattgtggccaataatacaaaccaacaactaaaaggatcaaaggaatagctgcaaaacgcaataaaatgagagacagtatggcgcaaataataccaaaggatcgcaaaacattccacttaagattgttcttcatctgttctcggatcaatccgatggcatcctgaaattgtttagagttttcaagctcctcaattttatgcgaatagtctgtagatgctgaatcattagaatgatagaaatctcccaatcaactccactcctttctgacctaggcactttactatattataacaccaacataactttgtagcaactgtattataatagttttcggttctttgaggaaacaaaaaaatcctgatccgaagaccaggattcgaggcacctttcggtgagaacagcaggttcacacaactgttcaaggtccgctcctgcgttacaattgaatgtagacctcctcagcgcaaaaggctccaaaggagccaatcgactcatcgcatgaatctagtttaccatgaacatccacaaactgtcaagaaggtaagtacttgcttccttcccgaatgcttaatggtgacaactgatctcgatagcggtcgataaaggcccctacccaatccggattgaccttggaatagttgcgtaagctccagccaattgccttatttataaagaactcgctttgacctagattattgaggatcactttttctaacaaatccgtatctgttttttctttcctcataagctggtgatcaatggcaatccgcctcaaccaaaagtcctgatccctactccaatccagcataacctgtttggtttctggaaatgtgaaagtaatctctccgatgatgcggtccaactgatcaatactatcccaccaggacttggtttgagccaattcctttagctttggaaaatcttcaggtctaagctccttcttctttttatccagataatccatagcaatatattgaaactcacggtaaggttgctgccaacactcttccacaaaagtccaatcaattggatcctttatgaagggtttaaaaaactctctttcaatctttttgagaattggtttttgaacgccaagaaagctgaatttatttttcatataagcttccattgctgagactttcgctggatcagcttggttttctaacaatttcaaaagaatttttgtatccatatgattcctccttttttacatcaaaggtccaatcaaagaaaaaagatagccacccagacgatgaaccataggtatttttgataaactttctaaagtgacttcctctgagagagcctgggttttctcaaaatcttcttcaatcttaagcacttccagatttttgtagagataaaccccatcttcaaaattttgatagaggcttcggtagtctgtattaatggttcctaccacagcttgttggctatcagaaacataaaccttagcatggacaaagcctggggtataacggaaaatacggacgccagcatccaagagggctttaaaatagttcgtcgcaatatcaaaggcatactgtttatctggaatccctggcataataatccgaacatctactcctcgtttggccgcgaaagtcatagctctaaccaattcgtcatccaagatcagatacggcgtcatgatgtgaacataatcggtcgatgtattcagtaaatgaagataaacatcctcagccaccttatgataagtcaatggtgaattgccataaggaagaaccaagccctggctctttctttgttgaggtttttcttgtagatagcgctccatatccgctttgtcttctattccggtcactgtccacatggtcaaaaagagagcttttagcgtttgaactgctgaaccatctaatcgaagggccgtatccttccaatgaccaaagcgttctagtttattgacatactcatcagcgatattaacgccaccagtataagcaacttgaccatcaattactgtaatctttcgatggtctcggtaattgtaataggttgatagaataggcttgactggtgagaaggcctgagctttaatgccaaccttgtgcaatcgctcgatataatcgtaggacaaggtagtcatctcattcatcccatcaaacatgacacgaacatccagacctgccttggccttctcctctaaaatggctaaaatctcaccccacatgataccttcgtcaatgatgaaatattccatgaagatataacgctccgcctttttcaaatcctccaacaaggctggaagcatgtcatctccaagtggaaaataggtaacctctgtgtctctgtagataggaaactgtgctggactatgctccaaaaaataagctaatctctgtaattggcgatcactttgggataaataatcagcaacttctggatcggtgcttagatagtcggatgcctgcactgtagcatcctcaagccgcttcttcaagcgtctcacacccaactcagctaacgaaaagtaaagcagagccgtcccaaaaattggaaagagggcaatgataatcacccaggacaatttggaacgagaatccatagaacgattgagcaagtaaaagaaagtaaagacactcaacaagtgttcccataagataatggatggaaaatgctcttgtaggctgagatatgaaatgacaagaaaggccaattccagtaagaagaacaggagaataggaacctttcggttaagtagaattttagcccatctggagggcttttggggtaacagtctagcactgcttacttgagtcatataggctcctttcatgtaggggagaccatcacaactttccgatctctttcagtaattttattagtatcgttttatcctatgcaaaaggtagggataattagctattgtgatttacaaatgtcgtgatttctactttattttcctaacagggccgtctatggtcttttgcatccagacgatatcatgccatttgttaaacttatagccaatttttggaaaatgagctacttggacatagccccgtttttcatgcatggaaatgctcgcttcgttcggaactgcgatacaagccagaaagcgtaagtagcctcgtgcttgcaactcctcttctaaggccgtatagagggccgatccaatcccttgtccacgcgcctctttggctagataaatagacaattcagtggtccaatcataggcagcgcgtgcataataagtcgaggcataggcataccccacaactttcccatccacttctgcaaccaaataaggaaattgggtcagcgtttttgtgatgcggctttcaaactcctggacagtcggtacatcaacctcaaaggtaatggctgtctctgtcacataaggttggtaaatcgctcggatagcttctgcatcgctgagctgaacgggtcgaatcatcatggtggcctcctaattagattatacctagtataccgatctgccttctcactgtcaatgaagagaggcaatgatctaatagtttcattttttgcaaaaggatttatatagaaaagaggttgagaaatccagtctcaacctctttagcttattccgcttttttatttgaaaattggctattgtagagctcatagtagaatcctttatctgctaacaaggattggtgatttccttgctcgatgatttgtccatctttgaggacaaggattttatctgcttcttgaatggtggacaagcggtgagcaatgacaaagctagtccgccctttcatcaaattcttcatcgctttttgaatcaagagctctaaacgcgtatccacagaagacgtcgcttcatccaaaatcaagattttaggatccgctaggagcgcacgcgcaatggttaggagttgcttttggcctagagaaatattgctagactcctggttcatttccatattgtaaccaccaggaagcgtccggataaagtgatcgacattggctgcttttgcggcttcaacaatttcttcatccgttgcctcgaggttaccaaagcgaaggttttctttgatagttccctcatacaaccaagcatcctgaagcaccattccaaattgcttgcggtaatcttggcgagacagatggcgaatatcatgaccatccactgtaatcgatcctgcagtcacatcgtaaaagcgcatgagcaaattaatcagggttgttttccccgctccagttggtccgacaatggctaccatttcacctggtttgacttctaggttgaaatcacggatcaagggtttgtccgctacatattggaaatcaacgtttttaaagctgacttgccctgtcaaatctccagagagggtttctgtcacatctgctacttcatctggctcatccatgacttggaaaatccggtctagagacgatttggcactttgtagctgtcctgccaattgggtcaagttttgaatcggttggttgatctgccaaacatattgaacgaaggcctgcatattcccgacagtcaaacgacctgctatcacttgcaagccaccaaacaaagcgataatgagataagtcaaatctgaaatcccatttaaaatcggcatcattaagccggaaatgaaattagccttgaatcctaccttttgaaggtgatgggtaatatcatgaaactcttcctgggaagatttttcccgaacgtagagcttaaggacgttaaagcctgttaaattttcttgcacaaagccgttcattgcccccaaaacatctgcctgctctttaaagtaaggctgagattttttcatgataaatcgagcactgaaataagtgatcggaatggacaaaatgaccactagccccagctgaatgtttaagtacaaaaccatgctgatgacaaagagcaaggtaaagatagcgttgacgatttgtaagaaggactgttgcaaggcattcgagacggtttcgacatcgctagtaaaacgtcctaacaaatcaccaaactgatgccggtcaaaataggaaaccggaatgtgattgattttatgagacaaatcatttcgcatgtcctgaacggtcttttgaacagcattagtcatgaaatagttagaataataagatcccagctcatagaggaccccacggaatagatagagcgtcataatgatcgcgatataggaggtattaagatcagctcccgcaagaccttttgccatatccatgagattttttgtcaactcagtaatggcaagccccaaaacaaagggttcgacaacactcatgacgacactcaggatttttaagaaaatggacaagcaaacttccaagcgataggctctcaaataagtccatagtctactaaaactgttttgttcttgtttcatctgcttctcctttctattcctctgttaatgatggactatcgagctgcgaattggcaatttcacgataaatctcattgatttccatcaattcatcgtgagtacctcgaccgacgatttccccttggtccaagacaataatttgatccgcatccataatggttcccacgcgttgcgctacgatcaagacggtcgcatctcctgtaacttctttgagacgcttgcgcaaagtagcatccgtcttgtagtccaaagcagagaaggaatcatcgaaaataaagatatcgggatctttgacaacggcacgagcgatggacaagcgttgtttttgaccacctgaaaggttgctaccaccttctgccaaatgcgtatcaaagcgctcctcacgactgtcgataaattccttggcttgggaaatttcagccgcttgttctagttcttgtacagaggcatcttctttcccataacgaaggttttcagcaatggttcctgtaaagagcaaggccttttgtggaataaaaccaatcttttggcgaagggctttcagattgtagtcacggacatccacaccatccaccaaaatcttcccaagtgttacatcatagaatcgaggaatcaactgcacaagtgaagattttccagaaccggttgagccaataaaggcaatggtttcgccaggtttggcttgaaaggaaatattatggagaactggactctccgtctcacctggataagcaaaggtgacattgtcaaattccaaatagccacgagatgctgtctctgttacaccattctcatttggatcaatcgaaatgggcatatccatgatttccttgagacgccggctagaaaccgcagtccgaggatacatggtaaagagattggctaaaaagaggaaagataagagcgcgtggaagctatactcaataaaggcaaccagatccccaattttcaaactaccgtcatgaagaggatccaaagcaaaccagacaatcgccacaatcatagcaatgatgatctgcacaaataggggttctgtcaaaccagtaagtttgaacaatttattcgagttttccgcgtagacttcattttcagccgcaaatttatcctcttggaattcttcacgggcaaaggcacgaatcacacgaagtcctgtcaaattttcacgggcaaattgattaagatggtccagggtcttttgttgcttctcagaaagaggacgtgtcttaactgctacataccaaacgacgacagcaagaaatggtacagatactgctacaatccacgctagagaaggactggtcgtcagaatcaagagaacactggaaaccatcatcaagggtgtgatgacccccatcttcaacatagaatccgcaaactgcatcaaaacaaaggcatctgaagtcaagcgagtgaccaatgacgataccccaatttgctcatactcgtgatgcgagtactcctgtaacttggcatagaggtcattgcgcatatcgcggaccatggtggtcgttagctgaccaaccgcgtaagacaagataatccgtcccacaatcccaagcaaaatgatcgcaaacatgacccagccccagaaatacagccgatccacatcacgcgggttaatcccctcatcaatcatgcgagctagaatcgttggcaagcccaaattgacaataacaaacaggaccgctgaaaatagattcagagctagccacttgggatactttttcaagtaagaccaaatataaagcatagatgattctccttttccataaataataaccttgatcacacagaaaagagggagcgagacgaaatcattttcaaagaaaatcattcctgccccaatcccatctgtagtctcgtttattatatcaaaccagtcataaatgtaaagcaaaagagagtgggacagaaatcggtaattcgttagaattcgatttcgtcgtcccacctccgcacagttgagtagggctgtaaaagctgatggaaccagcgtagtagagcccactcaaccactgcgtcttgctcgacaattcaaaaataattgagaggctaagacttttgtcccagcctctcagtcgctttatttcgtgcgtttgagtttagcatttttaagaataacaagattcgcttggtcactagaacttaatttagataaatcaaatgtcaattcatcacctttgatgttgtatttcaactccatatcaccataagaacgttttaatgatttttccttttgatcaacttttaaatccaattttaatggtacttcattaccagccatcttctgaataatttttaattccccttttgaatctttaatagtcaattcaatggtaactttcgcatctttcaacacttcagattctgaatcttgccccattaactgatctatattcgtctccattttgtaggtcccattatcacttttagcaccacaagctactaacagaacaactgcaaaaatagcaacaatacctaacataaggcgtttaacatttttcataatcaatctcctaatgtattttataatcagattttaccattattttaatactaattcaagatatttaaaaaaaagaaaagagcaggtttccccactcttcagtcgctttattttgtgcgtttgagtttagcatttttaagaatcataagatccccttggttgctattacttaacttagaaagatcaaatgtcaaatagtcaccatcgaccttgtatgtaatcttttctccactaccatcatttgacgagattgttttctctttttgattgattttgacatcataagatcgctcattcttttgaccagcgacttcacccgcgatgctgagggttcctttagaatctttgatcttaatagaaacttcaaaattaataacgtttccaatagactctaattgactacctgataagccttgatcttcaagaattttcttgagttcagtttttgatggtttgtagacataagtcccattatcacttttggcaccacatgccaccaagaggacggctgcaaaaactgcaacgaaagctaaaagaatacgtttaatatttttcataatcaatctcctaatgtattttataatcagattttaccactattttaataccgattcaagatgttttgaagaagaaaaagagcagatactctctgcccttctcttgtattattttgtacgtttgaatttagcgtttttgaacatttccaaagcggcttcatgacctgaactcttttcaccagataaatcaaaagtgaacacatcgcctgaaactttgtatttaaccttttcacctttacctgttttagattgaagagttttcttttgttggtcaactttcatatcaaatgattggtctgttttttgtcccatcatttcacctttaattttaaggctacctgttttatctttaatggtcactgaaacttccaatttaacattgtcgatcaatgcatctacacttgaacttggagcaccttgttcttcaaggatctccttcacttcagtttttgttggtttgtagacataagtcccgttatcacttttggcaccacatgccaccaagaggactgctgcaaaaacagctactacagccaaaagaattcgtttaaagtttttcataacttctcctttttagttagattcaccctattatatcaacaattcagacacacggcaatgaaagtttataaatgtcatattcttgtaatatttcttgtatcaacaaagaaatagaataaggcggaatttaaatcccgccatgattgcttatttaacttttttgaacttagcaattttcatgtagttattaaacatgtctgtgtcacccatcaaagaattcttcacatccttaatcgttaacacatttcctgaaacttgataagtaatttccgctttcccatactcattttctgagacaagagttttagctttttggtctacttccaaatcaatcacttgatttacattttgaccacctgcattggtgtctactttcatctcacctttcttatcattgattgtaatcgaaatagtgaatgagtaattatcacctatcaaagattgaaattcacttggcataatatctttgatctcatccttagtaggctcaaacacgtaagtcccattatcgcttttagcgccacatgctaccaaaaggacggctgcaaagacagctacaacagctaacaaaagacgtttaaaatttttcatcatcttctcctttatgatatgatttatagccattatagcaacaaattagcaacatctcaagggaatatagcaaatgtaacatcattaaaactgcactatttagtaggtttagagaaaataaagagagctacacatgttagctttataaaagccctctattcacattctatcatcattattttcaacgacaaaaaaaccgaggcctaaacctcggttttcattttgtttggaaactctattatttaagagtaactgaagctccagcttcttccaatttacctttgatttcttcagcttcagcagctgcaacaccttctttgatgacaccaggtgcaccatcaacaagttctttagcttctttaagaccaagaccagtgatttcacgtacaactttgataacgccgactttcttgtcgcctgcagatgtcaattcgatatcgaatgaatctttagcagcacctgcgtcagcagcaccagctgcagcaacagctacaggagcagctgcagttacaccaaattcttcttcgatagcttttacaaggtcgttcaattcaaggattgaagcttctttaatttcagcaataatgttttcaatgttcaatgccattgttatttcctccaaataagttttaattttatgtttttatttttttgtagctaggctacgctgcgtagcttaagattaagctgcgtcttctttgttgtctgcaaccgctttgactgcaagagcaacgttgcgcactggcgcttgaagtacagaaaggagcatagaaagaagtccttcgcggtttggaagagttgcaagtgcaagaatctcttctttagatgcgacagcgccttcgattgcaccacctttaatttcaagtgcttcagcgtcttttgcaaaatcgttcaagattttcgcaggtgcgataacatcttcgttagaaaatgctactgcagaaggtccaacgaatacagatgcaagatcttcaagaccagctttttcagctgcacgacgcaagattgagtttttgataactttaaactcaacttcgcttccgcgaaggttgcgacggagaactgtatcttgctcaactgtcaaaccgcgagaatctacaacgacgattgatgcagcagctttcattttttcagctaccacgtcaacaagttccgcttttttagcaataattgcttcactcattagtgtgttcacctccgtaattattttgcttggggaatttttccaaaagaaaaacgcgcccaaacctagacacgaaagtacaatacgcttcttttaattgatacgttttgtcctcggtaggatttttatgagtcgagctcccctactgtcttaggcagttttttcaaaccgtagattagtttatcatatataaaaaaagaatgcaagtacttttgcaaactttttttatattttttaatcgttgtagagactcttgatattattcaaccaagcataggccagtcccattaggactcctcctcctacccagttggcaaagaaggtgacaccatagtgacgtaaaatatttaaaaattcaaaatgcggcaattggctagaaactggattaaagcttaataatgagaaggaagcaaagtttgcagccaagtgttcattggtcataaagacaaacatataaatagcagagagggctaagagcaccttcgctgtttcatctttgaaatacaaataagaaagaatagcaatatttacaaagatattggcaataaccccttcaaagaaaaccacttgattgcttcgttggagtttattttctgccaccgtagctaggaatccttttggatcgatatgtgcaaaggctgttgtttgattgaacagaaaagcgacgattaaagcaccaattaaattaaagaaggtacaataaagaagaatttccagcgctttcttccaatgaattttctttagataggtccccgccgtcaaatacatcatatttgaggtggttaactccgcatttaagaataagaggtaaaccaagccccaggcaaagatgaatggaaatagaaaacgacccaatccaggtacaaaggaatttaataagtcagctgcaactgctccgaccgccgtacttaaagtaagaaatcctccagcaaaaatagaacggactgcatagcgcgttttagatttctgatagagatcttccttcttattacacgccgctccaactttttgaataaaattagattcagacatactattctccttatataatgtttgtgaacaaaatcattatatcatagagagaaaagtttgaaaaggttttcaggaagaattcttaaattttcaggatatacgatttatatcgaataatactatgtgctaaaaaacaacaaaaaaacaggcagatgcctgttttagtattaataattcaaacggttcgcccaggcgatatccaaattcaagatttcttgtgaagtgaactgttggcgatatggattataaaccgaacctgtgataccaccttgaacatttggtgaatcatattgagtcaaattataggtttcaatgatgttattaagttttgcatagtagcttgtgtctgtcgcataaacccctgtcaaagctgctgttgcatcttggtaactagaggtgttgctcttccatgcacctgcaaaatgtccttgtttcaaaacagctacatagtcttgcaatgattcatagtaagatgggtaagaacgaaatgcgtcattaatcgtataagcatttccagcaccgtcatcttcccaagtttgcatcactgcagattgaccagcataacttcctttaataccgaaaaggttgtaatgcggataagaagacaagccagactgacctgaaccactttcaaggatggcttgtgcgatcataacggaagcataaaggtcattctcttgaccgagctgacgagctgactcaccaatttgtgagataaaagcttcagtagggtctgaataagcttggtaagttccatcattagcgccaactgatgtgacgtgctcgctcatagcagcagcaaatgtccccactgctaatacagaaacgaacaaaccaaataatttcgttttattccgtattttctttttcataatacaatttatctccaattaattttttatcatcttttatctttatagagattataccatataaatagaagaaaacaaaggcacttatattacacttgtattacaattgcgagataaatccaaaacaaaaatgacattttcatgtcatttcaatttatttcgtaaaacgcattttctaaaatagcatcccatgacttctctagtccttccctggttacagaagaaaagacgataaaggtatcagctggatcaaaatctagttttttcttgatgatcgattcatgtttgttccattttccacgtggaatcttatctgccttggtagcaactaagatcacaggaatctcataatattttaagaactcatacatctgaacatcatctgctgaaggttcgtggcgaaaatcgactaggctaacgactgcttttaagttttcgcgactagtgaggtattcttcaatcatccgcccccacttctcgcgctctttttttgaaacacgtgcatagccataaccaggtacgtctaccaaacggagtttatcatcgatattgaagaaattgagcaattgagtttttcctggttttccagatgttctggccaggttttttcgatttaagagagtattaataaaagaagacttgccgacattggatcgaccggcaagtgcaacttctggaatctcatcttgaggataatggctcttatttgcagcgcttaagaggatatccgcattatgtgtgttaatttccatattttatctttctaggctgtttcaagaattggtttttcagttccatctacagcttcttttgtgattcgaacaagtttgacatcttcttgacttggaatttcaaacatgacatccatcatcgtttcttcgataatcgaacgaagtccacgagctcctgtttttctttcgatggctttattagcaatctcttgaagggcttcatcatcgaattccaattcaacattatcataagaaagcaatgtttggtattgttttaccaaggcattgcgtggctcttttagaatacggacaaggtcgtcaactgtcaattgctcaagagcggcaaagactggaagacgtccgatcaattctgggataataccgaatttttgaatatcttctgccacgatttcttgcatgtaagagcttgattcatcaatggctttattgttcttaccaaaaccgatgactttttcaccgagacgttgcttaacaatttcttcgatcccgtcaaaagctccacctacaatgaagagaatattcttggtatccacttggatcatctcttgttgtgggtgtttgcgtcccccttgaggtgggacactagcgacggttccttcgatgatcttcaagagggcttgttgtaccccttcaccagaaacgtcacgtgtgatagagacattttcacttttcttagcgatcttatcaatttcatcgacatagataattcctcgttcagcacgctcgatgttaaaatcagccgcctgaagaagtttcaagagaatgttttcaacgtcttctcctacataaccagcttctgtcaaggctgttgcatctgcaatggcaaatgggacattcaagctacgtgctaaggtttgggctaagaaagtcttacctgaaccagtaggaccaatcatgaggatgtttgatttttgcaattcaacatctgtctcgtcttcgcgcgtatcgtggaagttgatgcgtttgtagtggttatataccgctacagcaagagcacgtttggcacgatcttgaccgatcacatagtggttcaagatattgagcaattcgattggttttggaacttcgctaaggtctgcaagaacttcttctgctagctcctcacggataatttcttgtgctaactcgacacattcattacagataaacgcgttgtttcctgcaatgattttttggacttcatcttgactctttccgcaaaatgaacaataaaccatcatatcattattttgattcgttggcatgtatttcctctttctgtcattttctatttctatttagtttaaaataaggtcatgtaaaaggcgtgaatggaattcacaagattggtaaaagcatttagtaagaataaaatagcgaggccaaaccgttttttacgaaaggtttgtaaggcgcaaatcaaacagatgacacataggacagctgtaaaaaaaccaaagacacttcgctccattagtctaaatcctttctcttataatagttgaccgtaaaatcatatgggttcttctcatctttcggatgatggacttgacggactctttcatagtggctctcttcaaatgttggtgccaatgtatcgccatcaatcgttgcatgaatcatggtctggatcaactcttctaactggtcagagaagagccttaaaatctgactgcctccaataacataaagattcttctcttgcttctgataccactccaagacttcttccttgctgtgcatgacgagtacagcatcattttcaggatcataggcttgatcttgcgttaagataatactagtccgacctggtagaacccgttttttcataccatcaaaggtcactcttcccatgagaatggcttgtcccatggttgtttctttgaaatgctgaagctcagctggcagatgccaaggcatgacttggtcctttccaataatgccattttcagtttgagcccagataccaataatctttttcattctctcgtcctttacactgatacttctattttatcaaattttcttataaaagactgatttcaactatctagtttggaggatattttttcaaatacaaacagaaaaaaccgcgaaattttcgcggtttttcttagccacaagttagcttagtcttctttattgcgttttgcaaatccaaacaatgagagacctgctaaagcactaaagattgcaagaccagcagtagaagattcttttgttcctgtatttggaagttgtgcagtaggattttgtggatcgatatacttcacttcttctttcgtttctggaacgacaggaatcgttcgctcttctggttttggttgtggttgcggttgtggttgcggttgtggagtaggctgtggctgtggctctggtgtcggagttggatccggcattggagttggtgtcacagtcttcttgtagatatgttgagtgtttccatctttatctataacagtcttcacgaagtcataacctgggatatccttcttcggttgttccccatcttctgttgggttacctgggattgggtccccattttcgtctacatatgacgtcgtaactttttcatagacgtgttctgtatcaccattaggcaatttcttcgtttctacaaagcggtaacctggaatttcagcttttggttcttctccatcaactgtaggatatcctgggatttccttaccttctttatcaacaaacttagtgattggaaggacagttggtgtgtaagttgcggaagctttggttccattcacatcttcgcgaaccactgttacagctggtgcagttccagtaaattcaggttctggagtgaaggttacggttccgtctgctgccactgtgtaagtaccaacacctggaattgtcttcgtagttgaaccatcttcaaatgttgctggaactttgtcattcattggtacacggctatcaccttctgtgaaggttggtttgcctgtttgggtttgacccttcttaccaattgaagtaactgattctgcagttggtgtaactggtgttacagttggtgtgtaagtagcggtaattggtgtaccgttcttatcaacacgtttcacggttacgcctgtacctgttcctgtgaatgatttctctggaacgaaggttacggttccgtctggagaaacggtgtaagttccttctcctggaataactttagttgttgaaccatcttcaaaggttgctggtacatcgtcatccattggcacacttgggttaccaggtgtgaagcttggtttacctgtttgggtttgaccttggatgtctgtagatgctgcagggtccgcagttggtgtaacaggcgttacggttggtgtgtaagttgcggaagctttggttccgttcttatcttcacgaaccacagttacagctggtgcagttccgacgaatgatttttcaggtacaaatgtcactgttccgtctggggctacagtataagtaccaacaccttcaactgtcttcgtagttgaaccatcgtcaaatgttgctggaacatcatcgttcattggcacacggctgtcgccttcagtaaatacaggcttaccagtttgtgtcgcaccttggatgtctgtagatgttgctggcttagctgttggagttactggtgtaactgttggtgtgtaggttgcagtaactggagtaccgttcttatcaacacgtttcactgttacgcctgtacctgttcctgtgaatgatttttctggtacaaaggttacggttccgtctggagcaactgtgtaagttccttcacctggaataacttttgttgttgaaccatcttcaaaggtagctggtacatcatcatccattgggattgcagggttaccaggtgtgaagcttggtgtacctttttgagtttgaccttggatgtctgtagatgttgcaggatcagcagttggtacaactggagtgatcttaggtgtgtaagttgtctcagcaacagttccgtttgtatctttaccttgaaccttaactggaaccacatcacctgagtatgatttatccgttggtgtgaaggtcacaacacctgtttctttatcaacggtgaaggtaccgatcacatcacctgctggtgatttcgcatctacagatgctgctggctgaccattttcgtcaagaagagtaatggtatccttgtcgattggtgcaactgggtcaccttcagtgaaggttactgttccagtttgaaccacaccttgaggtgcttctgatgtagctggagttgctgttggggttactggagtcacagttggtgtgtacttagcagtaactggagtaccgttcttatcgacacgtttaaccgttacgcctgtaccttctccagtgaatgatttttctggtacgaaggttacggttccgtctggagcaactgtgtaagttccttcaccaggaacggtcttcgtagttgagccatcttcaaatgttgcaggtgtatcatcatccattggaacatttggattacctggtgtgaaggttggtgtacctgtttgcgtttgaccttgtttgtcagtagatgttgtatcttctgcagttggtgtaactggtgttacggttggtgtataagttgcagaagcttttgttccgttcttatcttcacgaaccactgttacagctggtgcagttcctacgaatgatttttctggaacaaaggttacggttccgtctgctgctactgtgtaagtaccaacaccgtctacagtcttagtcgttgagccatcgtcaaatgttgctggaacatcatcgttcattggcacacggctatcgccttctgtaaatactggcttaccagtttgtgtagcaccttggatatctgtagtttcaactggtgttgcagttggagttactggagttactgttggtgtatacttcgctgtgatttcagtaccgttcttatccacgcgtttcactgttacgcctgtagcagttccagtgaatgatttttcaggaacgaaggttactgttccatctggagcaactgtgtaagttccttcaccatcgacagtcttcgtagttgagccatcttcgaaggtcgctggagtatcctcatcgattggaacatttggatttccttcggtgaaggttggtttacctgattgtgtttgaccttggatatctgtcgatgttgcatcttcagaagttggaacgactggagtaatcttaggtgtgtaggttgtttcagcaactgttccgtttgtatctttaccttgaaccttaactggaactacatcacctgagtaagatttatctgttggtgtgaaagtaactacacctgtgtctttatcaactgtgtatgtaccgatcacatcacctgctggtgatttcgcttctactgatgctgctggttgaccattttcatcaagaagagtaatggtattcttgtcgattggcgctacttcatcaccttcagtaaaggttacagttccagtttgaaccaaaccttgaggtgcttcagattcagctggtgttgcagttggagttactggagtgacagttggtgtgtaagttgcagaagctttggttccgttcttatcttcacgaacaaccgttacggctggtgctttacctgtgaatgatttttcagggacaaaggttacagttccgtctgctgctactgtgtaagtaccaacgccatctactgtcttagtcgttgagccatcgtcgaaagtagctggaacgtcatcgttcattggcacacggctatcaccttcagtaaattcaggcttacctgtttgagtttgaccttgtttacctgttgtttcaactggtgtagctgtcggtgtgactggagtcacagttggtgtataagtcgcagaagcttttgttccgttcttatcttcacgaacaaccgtcactgctggcgctgttccgacgaatgatttttctggtacaaatgtaacagtaccgtctgctgctactgtgtaggtaccaacgccatcaactgtcttagttgttgatccatcgtcaaatgttgcagcaacatcatcattcattggtacacggctgtcgccttcagtgaatacaggtttaccagtttgtgtggcaccttggatatctgttgtttcagcaggagttgctgttggtgtaactggtgttacggttggtgtgtaagtcgctgaagccttagttccgttcttatcttcacggacaacagttacagcaggtgctgtaccgatgaatgttttttctggaacgaaggttactgttccatctgcagctactgtgaaagtacctacaccgtctacagtcttcgtagttgaaccatcatcgaaggttgctggaacattttcattgatggctacagtcttctcaacgccatcaaccgttacagttccacccttgaattcaggtttacctgtttgagtagcaccttggatgtcttttgtttcagctggtgtagctgttggagttactggcaatactgttggtgtataagttgcagaggctttggttccgttcatgtcttcacggacaacagttacagcaggtgctgtaccaatgaatgttttttcaggaacgaaggttacggttccatctgcagcaactgtgtaagtacctacaccgtcaacagtcttggttgttgaaccatcatcgaaggttgctggaacattttcattgatggcaactgtcttctcaacaccatcaacagtcactgttccacccttgaattcaggtttacctgtttgagtagcaccttggatatcttttgtttcagttggtgttgctgttggggttactggaacgatttctggtgtgtaagttgtatccaccttgataccgtttgagctttcagcttgaaccttggctggtgtgactgcaccagtgtatgatttatcagtcggtgtgaaggttacttgaccagttgctgggtcgattgtgaagttaccgatcactgttgtaccgtctgccgcataagctggtgtgcttgaaacttcgttaccatctttatctagcaatgtgtagctattgtctttaatggtaatagctttatcttcaccatttacttgaacagttgttcctgcaaaggttggtgtaccggtttgagtcgcaccttggatatcttttgaagttgcagggtttgcagttggaactgctggcacaacagttggtgtgtaggccgcatctgaagtaatggttgcagtcttaccattagcatttgtaatagtagcagttgcctgaacagttactccttttgcagtaccgacaaagtctttttctggcgtaaatgttactgctccagtcgttgggtcgatagtatagctaccttcacctgctactgtcactgttgtttcatcagttggttgaccagttgcgggatccaccaatttcttgctagtgatttcagcagtcttgtcgttactcaaatcaaaggttggtgtttgggtttgaggaacgttttgaatatccgcagaaaccttgtctgtaggagtcactgttattggagtaaccgttggtgtgtacttagcggttgctgtcttaaggtattcatcacggacggtaccgtctttatcttttccgacaggtgctgttactgatacggtaacaccttgagctgtacctgtgaatcctggttctggaacaaaggttactttaccagttgcatcgtcaatgctgtaagttccttcacctgctactgttacagaggttgcattggttacttgaccagtcgctgggtccaccaatttagcagggtattccaagcttggagtgacagagatcttttcgccattagcattcgttgtagttgtgttaaaagtaggtgtaccagtttgagtcgcaccttggacatctgatgaagtcttatctaccccttcaatttccgttggtgtaactgttgggatgtatagaccgtccatggtattgatggcagtatcgacattggcttcatcggctgggaattttgttgaccaacccgtatcgtagccattgctgtctgtacgacggatagagataccgtcagctgttccaaggaagtgatcttcgggaatgaactcaacatccacagaagttccgtttgaagtgatcttgtacttcccttgaccagctacagcatagtagccatctgcaccaggtgttacgacttgccctgtacggttatctatcatttgtggagctactgtttcatcaatttttgctgactcagttaggctatagccttgcaaacctcgagcagtaaaggctacagtagcggtttgttttgcaccttgagggccagttgtttctttaaattccccttttggtgggtgagtgatttgagtcttaaagtcttcaacctcaccagagaaagccatacccgttgggctttcaatctccttatcattctttgcgatacggatccgaacacccaattcattgacactaggatcaatataggttttactctttgtaaagcttaacgtagccgtcccatcttgagtaatggttgttaaatcagaacgttcatcttcatcgaaggttccgttttggttgaaatctatccaaccatagatgttagcttttgctgctccacccgtatgagcttccactgaaatggtgtaattacctggacgtgtccggtccatcttgatcagctcattggtttttcctttgagatcatttggaagtaattggtcgatgccttcatccgcagtggtcgccttgtcatcacccgtccaatcaagggtattgttttcatccatatcaggactcaagtgaccgagataaggttggttcactttcttaccagtaattccatctacagttgcgatcgaatgaatcgccttaccgtatgattcaggcgcatctccttcatcaagtgggaagaatcctagcatagcagactgtttaccacctgaagcgatgtaaagaccgatttcagaagctccctttgtcataacaagaggaacatcaacatcatttgcagaaatatttggtccgaagacccctgttccgagacctccagttgttaaatcagcacttccgaagtacttccaagcaaccgcttttttatccggcccagcttgagttgaacctcgaagttggttaagattcaacccatagaaattcatgccatttatatttgtggtagggtttgaaccaaataaattgtctgtatcttgtggaatgtaggttacattatatcttctagtcgattttttccattcccctatatgtttccatccttctccattggtggtaaacagaaccaattcaccagggttagccgactcaccatctgccatgacaatggcaggtttgacggctttgccacggaaggtcgcagaaacttcaaactggatcccaatgttcccgccggttaattctgaactaatagtagttttcttagttgtaccagtatcaatcccctcgtttttaatttcagtccaacggttttgaggctcggcaataaccttagcttcttcaccggcattaaattccgccaaggtaaacggatttgcatttccattcacataaccatttctagcattggggtcataggtcgctttttcagcttctgttgctcctcgttcttcaaggcgttttttgtatatttctgtcgcttggaagggtttcaaagacttgactttgatggtaaccacatagcccggcataatttccttggtgtaggtcgcgccgacttggagagcaagttcaccttttgatgttgtagtagtccctgtccagttggctgtatcgccaaagtccaaccaagagatttggctggctatgtctttagcatcgatatttgttgtaaggcctggtttttcaacttttggtgttgaagttgcatcttcaacgtcatccccgattaagcttggatcattggcatcacccagggcacgacgattacgttttttaccagaagtttgggctgtctcttccgttgctactgtattgtttgctgttacaccttgtccagctgaaagagttgcttcttcttttttatctgtacttgttgcagttacttctgctgccttgtttgttggcgtagttgcttctaattttggtgttgcagcggttgatgttcccggtgcagttgaggtagcagatgttgctgaagctgctgtacttgtgctacttgcttcactagttgaagcaggtgctgttgatgttgctgcagcagttgaagtctctggtgcagtgattgctgcgtttgcatcataagttgtagctgctgtactagttgttgcagcggttgatgctgctgaagtagctgttgaagttgcgggcgcttctgacgctgttgcaactgctgctacactttcacttgtcatatctgtcttttcttcagcggctgcacttgcggctgtcccaaccatgacaagtgttcccaacagtactgagcaaacacccacattcaatttacgaattgagaatctgctaatacgatcattaaataagtctttccccatctaatggacctccatttttatctataaattaacattctttttaaaattgtctagttttttccaaaccttatctattttaacaaaacccgaacgattttcaaaacattttgactcaaaaatgagtaaaaatttttagctaaaattgttttaatttcaaaaggattttaccaattgatcaaggcatcaaaaaaccttgatttattactaaatggcaagatcgaacttcaattgtggcttcactggatcgtaatcgaccagttcaaaatcttctggtttgatgtcaaagaaattggttccatctggtacattcaaaaccaaatgtggctgacaatctgaaggctcccgacggagtaactcttcagcctgttcaaattgattatcatagatatgaaggttattaatgaagtaaaagaactttccgaccttccagccaaagtgcttggcaatcatcatctgaagagctacatattgcatggcattgatatggtgggctaccaacatatcatttgaacgctgggtcagggtcgcatctagatagatctctccatcaacccgacgcacgtcaaacatggtctgaaaagcacatggcaagagtccgtcggtctcctcaaaggcatcataatcccagagcgagatgatgttgcggcgattccaaggattggcttctaattgtttgaggattttattggtaatgtcatgccttttgaccacagcaccatagcgctgaccgatagtacgactatcccctacttcccagtcattccagtagtggacattgtacttgtcttctaacaggtctaagctattcgactgatcctggtagatccagagcatctctttgatggctgatttaatggcgatgggacgaagggtcgtgataggaaactcgccttttgagaggtcaaactccataaaggctcctgtgatgtacttggagttggccgttctgccatccttgtacttaggacgcgcctgctctgaccagaccccttcttccatgatttttcgaatattttctttaaaaattgtatctgcttttgtcatatctcctcctttaatctactattgccttcattatatcacaggataaagaaaaaaggagagggaaatctccttttaatcttattgtaatactagagatgcggcaccgatgacacccgcatcatttcccaaagtagcaagtgctaattgagtagattcacgtacttgtgggaatgagttttcttcaaagaccttgcgcacgccatccaagaggaagtctccagcagcagataccccaccaccgataacgatcttagacgggttcaaggttgaaccaatattggctgcagcaagtccaaggtagcgtgagaagttcttataaacgatcaaagcaagagcgtcaccctcttttgctagatcaaagaccgttttagctgtcacttcttcaccattgtcgatcaagactttcaattgagagtccccttcgtactcatctgcataacgacgagtcaagttgacgatcccagttgctgaggcaaccgtttcaagacagccttttttaccacaggtacattggattggatcatcaaagtcaaccgtgatgtgaccaagttccccagcagctccacgcacaccgtgcaagagacgaccttcagcgacgataccaccgccaacacctgtaccaagtgtcatgaagacaacatctggttggttttcaccagcccctttccaacgttcacccaaagcagcaacgttggcatcgttatcaatgaagaatggaatatgaagggcactttcgattttttctttaactggttgaagggtcttccagttcaagttgtaggcaccgataactgtacctttttcacggtcaacgacaccaggtgaacccattccaattccttggaactcagaagcatcaagctcaagcatcttcaaacgatgcgcgatggattcgatcatatcatctacgatatggctaccttcatccaagatatttgttttaatagaccatttttcttgaacttccccatccaaagtaaggatggcaaacttaattgaagttcccccaaggtcaataccaataatttttttagacatctgtaactcctttcaaacttgtaaacacttacagatctattatatcagactttttatcaaacgcaaaggtttgcacgtaacttttcttaactttttaacaagagactaaaggattgaaatcctaaaatgaggaaaatcaagccaataatatttaatagaaagacgctaatcgaaagcggactaacaattaagaataaaccgatgaagagctgtagcaaggcaaagaaaatataacgcttggacagttcctcaaccttcctcgagtagaaattggcttttcggaagttcaaaatcgaacggtagatgagccaaattcctaaagtgactggaaagacaatcggcaaagtcttgtagccataaagcagtaagtagaccgcaaaaaccaaggcgaccatactgtgaaagagctgttgctgctgaatgataccagcctgacgcaatcggtaatagcgtgaaaaacgcgaaagggagattaaaaagaaaccacaggaaatcaaccagctaaatgagccgatgtgctcaatcggattgataaacaagacgataccgataatagtaaaaatagtggctgaaatcccaagggatatccggttcaattgattcatagggcctccttattcatctaattcgctcagatattcatagcgatcgtacttctcaagcaatcgctcattttcctgatccaattctttttgaagggctgacaatttgccaaagtcagagccgttttcattcatctccacttcaatctctgcaattcgattttcaatcgcttcgatatctgcctcaatacttgcccactcttgcttctccatgtagctcatgcgcttcttctcttcttttggcttgacaggtttctctttttcaatcttttgactagccgttacctgggctgcttcaaaggctttttcatctaaataatccgtataattgccaaagaactcacgaatgcccccattttcaaaagcaaggatcttgcttgcgaccttgtctaggaaataacggtcgtgactaacggtaataacgggaccaccaaagttttgaaggaagttttccaaaaccgtcaaggtagcaatatccaagtcattggtcggttcatcgaggagaagtacattgggtttttcaatcaagagtttcaagagaaagaggcgcttcttctcaccgccggagagtttctcgatcaaggttccatgcatagagcgtgggaagagaaattgctccaagagatctgcgatcgaagttgttccgacagtcgtcttgacttcctccgcaacctcttgtaagaaattaatcacgcgctcgctctcatctaagccatcgatctgttgagagaaataagccaccctcacggtttccccaatgatcacttgccctgactgaggctggagtcgctcagcgatcagattaagtagggtcgatttaccgacaccattatccccgacgatcccgatgcggtccttattttgcactaagaggttaaagtcttgtaaaatcggcttattttcaaaagcaaaactcacattcttaaactcgatgactttctttccgatccggctggtctcaaagttcatctctagatccgtctgattgctttgcccagacaagtcttgcttaagatcatggaaacgattgatccgagcctgttgcttggtcgcacgcgcctggggttgcctccgcatccaggttaactcctgcttatagagttgctgcttcttatgaagaagggctgcatcacgctcatcttgctcagcctttaagcggacataatcctggtaattgccttgatactcaatcaaactagcccgatccagctcaaagatccgcgtcgagatattatccaagaaatagcgatcgtgggtaatgaagagcacggttttcttagaattcttcaagaaattggtcaaccattcaatagtatcaatatctaggtggttggtcggctcatctagtaagagaaggtcgtggtgagacagcaaaacctgggccagttgaacccggcgacgcaagcctccagatagatctccaacttttgcatttaagtctttaatcccaagttttgaaaggactgtcttgacctgactttcgatttcccaagcattgagtgaatccatctccgctataaccttttccagacgtgcttggttctcttctcggtaatccgccatcaagaattcataatcacgaatcaactgcatttcacgcaaatcactagataacaccgtatccaaaacagtcttttgatcatcaaagtctggctcttgcgtcaagtaaccaatcgtataatcacacttggcagaaaaaggactcacatctccatcaaagccagagcgaccagacaacacatctaacagcgtggtttttccagtcccattgaccccgatcagtccgatccgatccaagtcatgaatgataaaggaaatctcacgaaagacggtcttatctccgacagatttggttaatttatcgacaataaaatcgctcatttttcctccttttttgcttgctggatataggcaatgatggcttctttttcattggccagttccccatcgacaatggcatattcgatctttgtcaaaatctctcccaaggctggaccaggttgaaagccatattctttgatcagcatgccaccattgaccaccacttcgtgcttatcatgaatggtcaagctatcatagacacgctcgatggccagataatctacactcaaggcatacgcttcacgaagctcttcagccactagcaacaaacgcttctcatacttgtagcaagcacgcttgtctagacttcctttttctcggagcttaagaatctctacgatctgctccaccgtcttggcaaactctctagaggtcttccattttttaaagaattttggaatatcttgaatctctagtgctaagaccagagcagcccaggcttgctcagaagttgaaaaggtatattccaactctatgtcaaacaaacgctcgattgcttctttgcgatccttcatctctggcagatagtgataagcaccacttgcaagcagggcctccaagccctgtctccagaatggagaaagcaagagcttatcaaactcgatgaaggtgcgctctacagaaatcttctctagtaagggagcgcactccttcatggcatcaaaggttgcctcttctaattcaaatccaagactggcttgaaaacgaaagcctcgcatgatccggagtgcatcttcgttaaaccgttcatgaggaatcccaaccgcccgaaggaccttgttttctaaatcttctagtccatgaaagaggtcaacaatttctcctttttcatttaaggcaaaggcattaaccgtaaaatcacgacgcttgaggtcttcttctagcgagcgtacaaaagacacggagcttggacggcgataatcgacatagacatcctctgtccggaaggtcgtaatttcatattcttgaccattttcaaggaccaagacggtcccgtgttcgataccgacatctactgtccgatcaaaaatcgccttggtctcttctgggtatgaggaggatgcgatatcgacatcgtgaatcggacgatccaagagggcatcacggacagatccccctacaaaataggcctcaaaaccagctgctttaatcttctctaatattggtaaagcctcctgaaactcagaaggcatcttttctaatctcatagtaagtgttccaaaccatagacaagctcatgacgcttgacaacttctttaatccctagatttactcctgtcatgaaggaaacacgatcataggaatcatgacggagagtcaagccttcgccttggctaccaaaaatcacctcttggtgagcgactaggccaggcaatcgaaccgaatggatgcgcatcccttcaaactctgcacctcttgctccaggcatcaactcttcttcatctgctgcaccttgctggatcttctcgcgcttctcagagatcaactcagcggtcttaatggctgttccactcggtgcatcttttttcttatcgtggtgcaattcgataatttccacattcgggaaatacttagctgcttgcgctgcaaattgcatcaaaagcacggctccgatggcaaagttcggcgcgatcaagccacccaagcccttttcacgtgaaaggtctgtcaattcttggatctgctcaggagtgaatccagtcgttcccacaacaggcgcaaagccattctcaattgcaaagcgagtattttcgtaagcgaccttgggcatggtaaagtcgacccaaacatctgcctctagacccacaacatcttctttgtggttaaagacagggacacctgcaacctctgtctcatcagtaaatggatcgatcaagccagctaattctaactcaggatcttcagaaaccatcttgtaggctgcttgtcccattcttcccttgaaacctgcgataatgactttaattgacatagaattctccttaaacgatagggatatacccaactgctaagctatggtcacctaagtgcgtcccaataactcctccaaaggtagcaaaaggaatgtctccttccactccttcttcgatgagcagttggcgaagtgcttctgctttttcagggacattggcatggatgacaaaaacttggtaatgaccatctgcaatatctgatacaacaatctctaccaagcgtttcatggctttcttttccgtccggactttctcaaagacctcaatcacaccttcatcattaaaatgaagaataggcttgatgctcaaaaggttcccaagaatagcagccccatttgacagacggccacctttaaccaagtggttcaaatcatccaccataatataggcggaggttccatcaatctggtgttggacattggcaacaatctcatcaaaggaacggccttcaccagcccatttcaagcagtcttctgccatcatccctagaggagcactggtgatttttgaatccggaaattcgacggtcaagccttcgaattcgtccttcaaatattggatattttggtagaaacctgagataccagatgacaagaaaagaccgatagcatgcgtatagcccttagctgtcaaaccagataagacttcttctaactctgcaacactcggctggctagtctttggcaattccttagaggcagccatcttttggtagaactcatcgtgtgtcaggttcttcccttcaacataagactccccatcgatatagatcgggatctctaaaataaataagtcgtcgtgatggagcacgtcttgcgttaaataggcagacgaatccgtgatcactgctaatttcattgattaaaactccaaattaatacccggtaaatcaagggcaatttctgtgacttcgtaagtcaaacggttgagcatattcaagcaagggcgagccaattcttccacttcgtctttgctgaattcgcttggttcattgacataacgaccaaacaagtggttgatttgagtgatggttccgctgatcacaaaaccgtcaaaaacgatcatgtagctcaagatgacaatcaaagaagttgtgttttgttcttgatcacgattgatcaattgaaagtttacatctacttttgtttcagggatgccattttctttttcccactcaaaattacgagcatcatagtggtattggctgacaaattctttttcacgttgaatatccatttttattctcctaaaaatatgcgataggcttattatatcataattcagctcaagataccaacgtagaatgaggtgattttttcgctagtacaagaagaaaaggttgggagtccccaaccttttaatcatatttagtttttaggtttgcgaagcaatccgaacaagataccacttacaactgcaccgatcaatacgaacaagatgtaaagaagtggatttgatgttagggcgataacgaagattcctccgtgaggagccatgagtttcaagcctgcaagaccaacaagggcacctgtcaatgctgaacctgcgatgaagcttgggatggcacgagctgggtcagctgcaccaaatggaatggcaccttctgtgatgaaagaaagacccataacaatgtttgtcaaaccagaatcgcgttcttcttgtgtgaatttatctttaaacaatacagttgctacgaatactgccaatggaggaaccataccagctgccataacagctgccataacaatagaaccacctgaagcaacagattcagcaagtgtacctgtagcgaagacataagcggctttgttaactggtccacccatatcgacagccatcataccgccgacgagaagtccaagaaggacagctgagctacctgacaagcttgaaaggaagttgttaagaccagtattaatggcagccattggaatattgatgaggaacatcaagaatcctgtcaaaccaacaccaagcaatggcaagagaaggattgaacggataccatcgagtgaacgtggaagacctgcaagggctttgcgaagtaagagaacaattccacctgcaaggaaaccacctaccaaagctccaaggaaacctgatgatacggctgctggtaattcacctttagcagcaccgtaggcgatatttccaaatgctgaccctgagctagcaatagatccagcgataaaccctgctacaaaaccaggtttttcagcgattgagaatccaatgtaacctgcaagtacaggaagcataaagccaaaggctactccaccaattgttttaaattgtgctgctaatacatgataagaaccaagactagacaattgatcttgaggcacacccataacttggtcaatcaagaaagcaagggcgatcaagataccaccaccgataacgaatggaagcatttgagaaaccccactcatcaggtgtttatagaaggctccacccaagctcaatttttcttggctagcgctagcttgtgcagcattttcagcgtggaagacatctgctttgccatccaagatggtttggatcaattcttctgtctgacggataccggctgcgactggtttagagatcaattttttgccatcgaaacgagcggtttcaactgctttatccgctgcaatgatcactccttcagctttggcgatttcttcagctgtcaagcggttgccgacaccagatgcaccgttggtttcaacgcggaccgtaacacccatttcttcaccttttttgatgagggcttcttctgccatgtaagtgtgggcgatccctgttgtacatgctgtaacggcaacgatgagaggtttgtcagatgaagctgcttctttgactgcttctgcttttttcgcttcttcagctgcagcttcttgctcttctgcatcaaaggcagcgatcacttgatcaggagtgcttgcttggcgaagtttgtccgcaaatcctggtttcatcaagtacttagacaattcagcaagggctgccaagtgagtgtcgtttgctccttctggagctgcgatcatgaagaacaagtctgttggttgtccatcaagcgaagcatagtccacactcttgttagatttcgcaaacaataccgttgcttctttgactgcttcatttttgctgtggggcatagcaattccgtcacccaaaccagttgaagtttgtgcttcacggttcatgattccagccttgaaggtgtcaaaatctgtcaccacaccattgtcaacgagcgattggaccatctcattgatcacgccctctttatctgttgcctgaaggtcaaacaacatcacgtttttatttaaaacgtcttgaattttcatagtttttctacctctactttttcataagtttcttttatatagtcagctgttgccaaatcatctgagaaggtggtcgctgttccacaagccactccccatttgaaggcttcgatgacatcacccgtcgttgcaagcttcccagtgaagccagctaccatggaatctccagcgccgacagagttcttcacttgacccttgattggttttgcgaagtaagtgccacttggactgacaaagagagcaccatcacccgccatggaaataatgacgttttgtgctcctttggctaaaatttctttagcatagcgttcaatttctggcaattccatcaaggtaacgccaaaaatatctcccaactcatggttgtttggtttgaccaattggggattgaactccaaggaatcaatcaaggtttgcccttcaaagtcgcaaaccacttgcgcacctgtcgcacgagttgctgcgatcaattgtttgtaaacggcatttccaagtgaagatggggcagatcctgcaaagactaccacatcatccgctgttaagctcgataagatgttgagcaattcttgcaactgagcttccgtcacttctgggccattcccattgatctctgtttcctcatcagctttgatcttgacattgatccgtgtatcttggtccactgtcacaaagttggttgaaatagcttcactggtcagtacgtcttcaatgaagcgtcctgtgaaaccaccgataaatccagtcgctgtgttctcgatatagagacgtttcaagacacgactgacattgattcccttaccaccggcaaatttatcttctgaagccatccgattgactgcaccggtctctacatgatcgagacggacaatatagtcaattgctggattcagtgttactgtataaatcaaacctctataacctccgttttttcttttaaaacctttaatcgttgcggttcacattgattggtgataatcatggctcgcttgataggagccactttgacaaaggatgtcaccccaattttcgaatcatccgctaggatataggtttttttcgcattttcgataatcgcacgcttaacagatccttcttccaggtctggagtgctgtaaaattcatcatcgattccattcattccaagaaaggccttgtcaaaattcaactgaccgatttgattgagcgcaatccctccgatactagcatctgtagaagattttacctttccaccgatgatgaccgtcggaacatttcgctcgaccaacttggtcgcatggtgaatcgaattggtcaccacagttaccgttggattgacaatttcttgtactaaaagttcattggtcgtcccggcatcgataaagatcacatcatgatctttgatcaattccgccgcttttacagcgatctttgacttaacttgaatgtttttgatagatttttctttattgctttcttcctcttgaagaaaatgcaggctttccgcaccgccgtgaacccggcgaagtttactttcagcttctaattcatccaagtcacgtctaaccgttgattcagacgtccctagctcttgtacaagggtttctaaggaaacaaatttttccttcagtaccttctcgaggatgaattgttttcgttcagacttaagcatttctcctccttttgcaatcgattacaaggactattatactccatctccaaaaaatgtcaacactttttatcaatttctatcattttctttcaaaaattctaaaagtgtacaaaaaaagagcaggaaagaactcattttgttaaaagagttcttttcccaccctcatatatcttctttgaagattttaagcaataaagtgtctaagcatctattctatcttcggtatgtcttaatcattttttgaagattgtttctttttcttgaaaccaaacaatccagcaagtaacccaacggcaacacctgttgttgctactgcatatttggaggaatcagatccagccacagcttggctgttttcttttttaggtttgatctcttctactttggcttcttgttttggagctggagtagctgttggtgcttgcacttgtggactattggtagttgttggaagaaccgttggtctatccgagaaagttgttggattgcttgagcggatatccattggcatatctgctgcttctaaaatagctggatccattcgtgacgctagatcttcatattgggaattcaacagttccacgacactttgataagattgcagggttgtgaattctgcttccaatttttcttttttattctctaaattagccacagcagctgataaaacagattgggctttgaccaataattctggagcatttttaaagtcagaaagacgtttttcagcagcaaccaggcgctcttgcgccgccttcaagccctcatgcgcttcttgaacgacttgggctttttctgcttcttcagcttttaaaagatctaatttctcacgcgcagccgctaacaaatccttggctttttgaagggctgcttcttttggctggatagctgcttcaatccgacctctagatacatcaagagtcgccttcgccttttcaaccgcatggtccttgctaatgagaagaatcttgtaattttggatggtcttttggacattggccatctctactgccacatttgaattagcatggcgggcatcttctaacttgccttgcaagataatgatttgagactcttgattggccttgtccaacttgagattagcgacttcatcagattttgctttcacatctgatcttgtcgtcgtagctccagctccctgacgcaattggtaagcgagtgcactggttgacactgctgaatggaccggactgtgtaagaaagctgcttctgacatagcattgctagggtcataagcgactgataaagctgtcgctttgttgtctaccatttggagatagtgaccaaccttagcaaaggcctcagcaccaatcttcatatagatatcattggcatcgatttgagtttcgtctgttggtagaccatattgagccgctacttcttgataagccgctttttcattgtaccaaaagtcaaccgcaccagcaggtgagaagccatatgcaatgttctcgtttggcaaatacttaaacatatgccagttagctttcttgaagtattctaactgtacttggctggcaggaagggaataaggatccagctccaattcaggcaagccggcgttgcgacgatagctattaatagcatccgcaatttcaagtgctcggaggttggcttgcaaagatccagactctccaactgttaagccgtcttcttcccgaccacgcttgtagagggctaaagcacttgctgcagcttcattgccattgtcagctaagtgttgcaagtaaccttcataggttgcttgactcaactgaactggactattggccgctgcttgttctaaagctgccaattctgcttccttggttgcgatgaccgctttcaaatctgtcagacgcgtttgagccagttgaatgtcgttctcaatttgagccactgtatctgagccagtttgctgactcgcttgcaaggttgcaaggtaattctgagattctcggatactttgctcgacttggctttgctccaacaaggcttggttgagcacattctcatcatttgaaatcggtgctttggcttggttcaattcattttgtgctacatcgaccaaagattcctgagcagtaacctgattttcctgttgacgaacagcctctacgacttggtcatgggcagcttctgcttctcgaaccttattttcttcgatagtcacataggcttgagccaccttgacgtcattttctgcattctgaacttgggcatccgatgtcgttgcgatgaggttttccgcatccgtcacttctgctttcttttcttccagttcttgtccagccgccttgacatccgtttgagcatcgatcactttttgctcttggtagtggatatcttttaccacttggcctttttgagctgtaatttgcttcaactcatcaaccgtaattggtttctcgactacttccgtgctgttggtttctggattttcattttgtttgacctcttcggcatttgccttgtgatgaaacatgccagataggaccgttgtcgcagcaatccctgtcgtgaaaaccgattttcctaatttctttcccattaaactcacccccaaaactgaattattttcttgaagtttctctaccccttagcataccacattttgttaccaataactagtaggtttaaaaagtttttttcataaatttttgaggcaaaagaaaaacagctgacgctgttagtcttcttgtttaatttgttccaacatcttctcttcttctgctgtcaactcatagttttctagcaagtctggacgacgttctaaggtctttttcaaactctgatagaggcgccactgacgaatattttcatggtgaccactcatgagaacatcgggaactgtcattcctctgtactcataaggtcgtgtgtattgagggtattctagaagtccagacgagaaactatcatcctggtgactggactcttttccgatcacttctggaatcaagcggaccgtcgcatcaatcatagtcatggccgctagttcgccacccgtcaagacataatcgccaagagaaatctcatctgtcaccaaggtcttgatccgctcatcgtagccctcatagtgaccacagataaagatcaattcttcttcctgagccaactcttctgcgtaggcttggtcaaaggtccgaccagcaggatccagcaggatcacgcgcggattcttcttctcaatcgcatcaaaggcatcaaaaatcggttgagcgcgtaaaagcatgccttgcccgccaccatagggttcatcgtccacatggcgcgctttttctgcattttcacggaaattatggtagttaatctcgagaagtcccttttcacgggcctttccgacgatggaatgctcaaggggagaaaacatctctggaaagagggttaaaatatcaatcttcatcgtctaacccttctaagatatctacatccacccggtttcctgggatatcaatattcaagactactggtgggatatatggcaaaagaaggtctcgtttgccttttcgtttcacgacccagacatcattggcacctggttgcaggatttccttgatctgaccgattagctggtcattttcataaacatcaagaccgatgatctcatggtaataaaactcgccatcctccaaatccgtcaagtcttcttccgcaaccttgaggctaaagcctttgaatttctcgatggcattgatatggtacatatccttaaacttgatgatatcaaagttcttgtgcttgcggtgactagcaatggtcaccgtctggacaaaacgatccttttcatcaaagagagctaactctgctccttttttaaagcgctcttccgcaaagtctgtcacagacaagacccgcatctcaccttgtaatccttgggtattgacaattttcccaacattaaaataattcatgatttcactacattcctcttttaattaatttatctttacagttctctaataagagttgcaattttttccgattctgaccagtgtagatagtggtggtttccacctagaatgagttttgtattagaattccaatattctgaatttctgtactctttttctctatacgcctgacaaaatacgaaaacaggaatattatctgctaagaacgaactatcaaaatcttcagcagtaatatttacagatagctgaaatccaggaacttgcttttccaattctaagctcttttcttccatcaatttccaaatcagtttttcagtttcagcttcaaatgttgcttgagttagccccttaaaataattttccggaccacattcttcgatcattctcatttgctcttccatttctggataaggattttttgaaaaatcagcaaacattatatttttggttgttggttcaattgctatcaaagcttgaaacttaattggtttactcattaactttaaagccaaaacaccacttaaactatgaacacaaagtatataattggaaatttccaatcccttcaggatttcgtataccgcttcaacaagattatccaaattaagtcctgtttgactatgaatcggactcctacctgtattcggaaaatcaatcgttaagtaacccattgaagaaggaagtttttcaagtattggtaggaaattttcataacttggtatcaaaccagcaccatttaaacaaactagtattttatttccctttttataagtaacagatagacaaccaatctttgtagatacttcaaatcggttcatatcaaaataactccttctgaacaaccattcacttaacattcttaggttttattttatcacgttcaagggattttctcaaatgcccttttttactaaaaaaccttccaaatcttgttcatgctgatacttgatggctgccttcttgtctttttcaaaaatggtcttcgttaggtcgatatggttgatagctgcaattgccactgtgtagtgaatgatatctgctaactcctttgctaattcctcgtttgaatcttggacaccctcttttctacctgaacgtccatttaaaacttcagcgacttctccaacttcttccactagtttgataaaaagtccttcttctgttctagattgttgataatgatcaagtaagtattcctctagttgtctaactgttaaatctctcattccttctccttgcaaaaaaaagcgggaccaagtcccgtctttttatttttcgtcaataacgattcttacttttttatcttcagttgggacagagtagacaatcgttcttatcgcagaaatggtgcgaccttttcgaccgattacacgaccaacatcgctaggatcaaggtcaaggtggtactccaagaattcaggagtatcttcgatcttgatggttaaagcatccggttgtgaaatcaagggtttcacaattgcaataatgagattttcaatcgtatccatacatcaacctacttaaaaaattattttgagaatttagaatcgtggaatttcttcatcacaccagcttttgaaaggatgttgcgaactgtatctgaaggttgagctccatcagccaaccatgcaagaacgcggtcttctttcaaagttacttggttttcttcaacaagtggattgtaagttccaactgtttcgatgaaacgtccatcacgtggtgaacgtgaatctgctacgttgatacggtagtaaggttttttcttagaacccatacgagtcaaacgaattttaactgccatttttataagtctcttttctatattttaatttcggtgaaatagacaagctatttagcacatgatctattataacacatttcatagacctgtcaagaaaaaaacttgacactatgtaatttttttattttatcagtaaatcggcgatttcttgatagttgctaacggtataagtcggcactacctggctggtattttccttatgatcagggttataccatacggtagcaatccctgcagcattccctcctgcgatatcagctgtcaaagaatcaccgatcatgagggtctcttccttgctaaaccctggaatcagctggcctactttgtcaaaaaatgcaggttctggtttctgagtatgaagttgttcagagataaatacctctttaaaataaggtgcgatggtagaatgagctaagcgtccttcttgaatggcagtcactccgttcgttgcaccatagagctggtaacctgctttttcaagtcgtgccagtaagtcctccgcccctgggaaagactgcccttgaagactgatgtaatcctggtagcgaagagccatctcggccccatcaactgtgatcccaaagtgggcaaacccaatcgcaaatcgactatccacgagttcttgtttggtgagcttcttttgttctaaatccttccagagcccttggttcataggtttgtagtaatctttaaaggcctctacatatggaaaattcatgtcttctaaaatctgcgtcaaagctgtttcttcagcagattcaaaatccaacaaggtatggtccaaatcaaaaagtaaaaatttatatgccattacaaacgatctttcaatttttctacaaataaataagctgctgggcaagtgagcgtatttttgatggtgagatggttgatctgatagatcttctttctatcggtgtgaggaaattcccgacaagctttcggacgaacatcgtagatggaacagaggttatctcctcctaagaaagggcaaggcatggatttaaaaaccttatccccatcctcgtcaacttgaagaaattctgcctcaaaggcaggaagcttcatcttgaaatacttggcaatccgcgtgatatccgcttccttaaaatcgggccctaaggtcttgcagcaattggcacaagccgtacaatcgatttcttggaaaacttcatcgtggatttcttgcgctattttatctaaattcttaggcagcttcttcttgagattcgccaatatcttgcggtgctccttttgcttttggagagctaactgatggtatttttcaatatcaatttcctgtgtcatcctctatttcctcttctaaacaatagaaagattataccacaaagactctaaaaaaagatagatcctgcgatctatctcacttgattaatccgttacagcgcctgttccatccagactccaagtgtcttcaatgtatgggataaaggttttcaatgtttctgcatctccttcaaaagaaatggtatagactttttcacccttttggaagatccaggtaatcaggtattgaccagatttcatgacaatttgaagctggtaggcgtccagacctgcgactttagttcgcgctcccgtcatcttcccaacatcctggttatcttgccacattacggccagtttcttggctagaaattcagcattaaattcaatatccgcaggaacttttgctttttcccgcgtatagctgttcaaggtgacaatgttataggcacttccatctgtgtattggaccgcttctgtcccatcgatatccgtgaatttgaaccatttacttggaatatcgatgtatccataatctgcatttccaatccgcttggtttcttgactggaagtgtttttctttgtagaagaagtatcctttgacgaagagctgcttgtttgcttttcgactttgctgccactttcttttgtagaagaagctgctgtgtccttttgagaggtgtgactacaagccattagtgtgcaggcagaaagaatcgtcaatgatgtgaccaataatttacgtttcatgctcaacctccttgagaacgttttctttcctctagtctaccatgaaagtgagtattttaaaataggataagtgtcacatctgatccaacctttctaattcagttcatttttttcaagcctaaaacaaaaggctgggacaaaagtcctagcctcttaattgtttttggattgtcgagcaagatgcagtggttgagtgggctctactacgctgatttcatcagcttttacagccctactcaactgtgcggaggtgggacgacgaaattgaattctaacgaattaccgatttctgtcccactctctaattgttattcttcatccattgacaagacagataagaaggcttcctgtggtacttctacagatccaatcgctttcatccgtttcttaccagctttttgtttttcaagaagcttgcgtttccgtgagacgtccccaccataacacttggccaagacgttcttacgaagagccttgatatctgtacgggcaacgatcttatgaccgatggctgcttggataggcacttcaaactgttgacgagggataatcttcttgagtttctcaacgatcaacttaccacgttcataggcaaagtccttgtgaacgataaagctgagggcatcgacggtatcgccattgagaaggatatccattttaaccaatttagatggacggtattcagacaactcatagtcaaagctagcatagccacgagtagaagatttcaatttatcaaagaaatcaaagacaatttccgccagtgggatttgataaatgacattcacccgattttcatcgatgtaatccatggtcacaaaatcaccgcgtttccgttgagccaattccatcacagccccgacaaactcttgcggcaccatgatttgtgctttgacatacggttcttcgatcgaagcgatcttggttggatctggaaactcagaaggatttgagacatccagtgcttctccatctgtcaaattgaccttgtagattacagacggtgctgtcatgatcaagtcaatattgaactcacgttccaagcgctcctgaataacgtccatatgaagaagtcccaagaaaccacaacggaaaccaaatccaagagcttgagaagtttccggttcaaattgtagactagcgtcattcaattgcaatttttccaaagcttcccgaagatcattgtatttgttagattcaatcgggtaaagaccagcaaagaccatcgggttcatctgcttgtatccatgtagtggctcacttgctggattggtcgctagggtcaccgtatccccgacacgggtatccgcaacggtcttgatagaggccgcaatatagccaacgtctcccgtcgcaaggaaatcacgtccaactgctttaggagtaaaaatcccaacttccgtgacatcaaaggtcttgccattgctcatgagttggatcttatcgcctggtttgaccatgccattgaccactcggacctgaaggattaccccacgataggcatcataaacggagtcaaagatcaaggcttgaagaggggcttcaacatcacccgtcggtgctggaactttctcaacgatctgctccaaaatctcttcaatcccgataccagccttggcagaagctaagactgcctcgctagcatctagaccgatgacatcttctacttctgtgcgcacccgttctggatctgcagctggcaagtcaatcttattaatgactggaaggatttccaaatcattgtccaacgctaagtaaacgttggctagagtctgagcttcaatcccttgagcggcatccactacaagaatggctccctcacaggcagcgagcgaccgcgaaacctcataggtaaagtccacgtgtcctggtgtgtcaatcaagtggaagatataggtttccccatctttagccgtgtagttcaactcgatagcattaagcttgatggtaatcccacgttcccgctccaggtccatactatctaaaagttgggcttgcatctcccgactagacacggtttcggttttttctaaaattcgatcggccaaggttgactttccatggtcaatatgggcgatgatcgagaagttccgaatcttctcttgtcgtttttttaattcttcaaaatttggcataatcatcttcctagtaaatttaatcgtactcttcattataacaaaaaagataggcctttgcctatcttaattcattattttcaaaaatcgcttctgcgttttatttccctcataacctattcgttcgtaaaagacatgagcttcttttcgatgagaggcagaatttaaacggataaaagcataatgcttgcttttggcaagatcttcaactcgctccatcaattggcgaccaatcccacgtccttgagcagatggaaaaaccgctagacctaaaacattaagcccggcgtcactataaagactttcatagacttctgcttccacataaccaagaatatggcctgtttggtcctcttcataaacaaagcaaaaatgatccgaatccggcgaattaaatttatcaatctgagctgctactttctcaagggtcgaatcataccccaatgcttggtgacataaatctctgatttgaggagcatctttgacttgaacagtacgaatcataccttcacctccatgaactctttgctcttatcttagatctttttcctcaaaaagtaaaggaatgtctgataaaatttaaaatgaaaatccgatttagatcaaattcatcttttttcgcatttctcagggatttctatttactttttcgatttaattcattataatagtaagggtaaatacaaggaggtgagtacgttggccagaggtcgtggaaaagcaagccctcaagacaaagaggcattacggattatatcggaaaaaatcagagaattactgaaagaacaaggaaaaaagcagatcgaattatctcgtattactggaatccctgcaagtaccctgactggatatgtaaaaggaacttctcttcccgttcctgaaaatttagagaagattgcagcctttttccaggtagcggttgctgaaattgacccacgattacgcaatgattttgtggtcattgattcagagattgaacgattgtataaacagctcgatgaaggaaatcaagaaaatcttctttcttatggaaagagtctcttgacccatcagaaagaaagacagaagattgaaaagcaataccactcttattctgtctatgattcttttgcagcttaccaaaatcaaaagcaagctgatatcgtctggtttgatcaaaagattccttacgatttggctttttggattcatacggattccctcgagcctaaatacgaaaaaggggctgttgtgttaatcaagcaaacctattatgatcaggcaggggctatttatgccattgattttgatggacaaactttgatcaaacgtgtctttcgtgaggccaacggtattcgactggtttccctcaataagaaatatagtgatcaaatcattccactagatgaggaacctggggtgattggaaaagtgattgatggctttgtgcctcttgatttggaggaaatcaaatgattaaattaattgcgattgacctggatggtactctcttgcatgaagataagtcgctgtctaaaggcaatatcgaagctcttcacaaggcccatgaagcgggctatgatattgtgatctgtacggggcgccccttagcgggtgtacgtcctatctttgaagagattggacttcctgatggtaactactatatgattatcaataacgggtgtacaaccttgtctactcagaattgggaaatcattggcaaggaagaattgagccttgaggacatgcaccggttgcaagttttgacggaagatacagacgtccagctaaccttatttgacatggatcactacctagtggtcgcacctgaagccagtgaactggttacgatggatgcgggcattgttaatagtaaaccgacacctgtctcagaagaggatctgcccaaccttgttcctatttttcaagccatgtatgtaggagagccttctgctattgatgccttccaagctcagcacgaggctgcattagaagctgattttaacactgttcgttcacagaatatcctatttgaaatccttcctaaaggcgcgagcaaggcttctgctctacaagcattaagccaaacattaggctacagtcgagaccaggttatggctcttggagatgcaaacaatgaccttgaaatgctacgttttgctggttacagcgtcgctatgggaaatggcaatgctgctgtcaaggaaatcgcagatttcatcaccctgaccaatgatgaggatggcgtggcccatgctattcacaaattaattgaaactgaaaaaggagaatgatcatgaaataccaaaatttgttggaccgttttattacctatgtaaaagttaacacacgttcagatgaaaattctacaaccactccaagtacccaatcacaagttgattttgcaacaaacgtcttgatccctgagatgaaacgcgtgggccttcaaaacgtctactatttgccaaacggctatgctattgggacacttccagctaatgatccaagctttacacgcaagattggatttatctctcacatggataccgctgacttcaatgccgaaaatgtcaatccacaaatcgttgagaattatgatgggggtgtcattgcccttggtgactctggtttcacactcgatccagccgattttgctcatttgaacaactacaagggacaaaccttgatcacgacggacggtactactcttctgggtgcagacgataaatctggtatcgctgaaatcatgacaactattgaatacctgacagctcatcctgaaatcaaacacggagaaatccgtgtcggctttggtccagatgaagaaatcggagtcggggcagatcaatttgatgcagaggattttgacgtagactttgcctatactgtcgatggtggtcctcttggagagcttcaatacgaaaccttctcagcagctggagctgaaattaccttcaaagggcgcaatgtccatccaggtacagccaaaggtcaaatgatcaacgctcttcaattggccattgatttccataacaaactccctgaaggagcacgtccagaattaaccgaaggctatgaaggcttctaccacttgatgaatattgatggaactgtcgaggaagcaagtgccagctacatcattcgggactttgaaactgaaagctttgaaaaacgcaaagacctcatgaaatctattgccgatcaaatgaatgcggaactcggtagcgaacgcgttctcctcaccctcaaagatcagtactataacatgaagcaagtgattgaaaaagatatgacaccgattacccttgctaaggaagtcatggaagatcttggaatcactccaatcattgaaccgatccgcggtggtacagatggatctaaaatttcctttatggggattccaacaccaaatatctttgccggtggcgaaaacatgcatggtcgctttgaatacgtaagcctccaaaccatggaacgcgcagttgataccattatcggtattgtgaccaaaaaataagaaacaaaaaaggattcggatagattgtccggatcctttattgtctattagaaagcttgacaatatctttgacctgatcaatggtctgaatcaggtgaaggcttgtctcattgatcggaagatagtagactttatctgccaaagattctgtaaaaggacgattcgtgagtaagatcacctgttgtcctttttctttcagctctttcacttgctttctcaccttttggtaaaaacgctcatcactgatttctaaatcatccaccaagacacaagcagcgtccaaagccaatgattcattggttccgttttgggtcagataataggatgcgcccgcttgtacctcatataagccagctgatggctcaaccggaagaaaggctgggcttgttgcaacttcttctttttccatcgctacaagattggctagaacctgcaaatagacaggtgctaatttactcaaatccaagagttcctcaaactcaaaaccacgtttcaaagcttctaagatatagaagagccggtggggcatatgacgagcaattttctggattaattcatcatcgctcatttcctcaggaaggatggtcagcaagttcttatctttaatggtttctagggcttgttgataagcctcatcgattctcttcccaaatccataaactgccccataagagtgaatttgggtattgaggcgggcatttttagcagcatcagaaaaaatcggaatcttaaagaaaatataatccaaactcggttcgtaaacagcctttagatcttttaataggggatgaggcaaatgctcgagagaccgccctaattgcagctgaactccttgctcaaacaaggaatagcccaagcccattgaggccagcgagatactgtctgaagcaaatggattaacttctaggatataaaaagcatagctcgtcggatctagagcaaacttgatcgaaatggctcctgtcagcttcaaatagcgactgatgtggatcgctgcttcacgaagattttgaaactcccggtcagtcagggtgaccgctggcataaattgataagagtcactagagtggatcccgacaggatcaatgctttcaatagaggccgccaggtagtgattgtcttcgcgatcgcgcatgacgacaaaatccaattccttaaagccataggtcgaaaattctagcaaacactgctgacttggagagactgaaagtcctgtttctactgcttcgcacaagtcatccaggttatgagcaatctttcgcccctgcccttgcttactcgctaccggccagatcataataggaaattgaatgccttcagaaaactcgatggcttcgcgaacagaaccaactagtgcggaagcgggtacctgatagcccaactcttgaaagaggcgtcgttgatccgcctgctgataaaaggtccggtagcgttggaggctcggtccgataatcctaatcgatgcgtctttgaaaaatccagtttcttccaaacgaaacaagaggttcaaaatctgtttatccgcaaaggttaggagcaaacgagatcctgtataggaaagaagagtcgtcctaagagcatccaacttgagcttactgactacaacctgttctccagcttcctgtgtgatagcattttcttcacccagataaaggacaagagcattcccgtccttgtcattgagcttttgtgcttcatttaccgcagccaagaggctaatatcctgataagaatctccacataggagaagcaatttctggttttgtttcatcattccttctcccttctactttcgtgaattttggcatcaatcaattctaaaaattcatcgtaaaaatagagattttcccttggccctggactcgcatccacttggaattgaacccctaaaatcggttggtaacgatggcgaaaagcttcgatactatggtcattgacgttttcatgcgtgaccaataaatcatgaggcagactatctctggcaatactatacaaatgattttgactcgttatctcgatttttcctgtcgcaatttcacgaacaggaatatttaatccgaagtgtccaacttccatgggagctagctccgctccataagcttgagccagtacctgtgctcccaagcccatgccccaaatcggaatttgaccattgattttttggatcaagcggcagagttttttcacctgatggggatctccaggcccactggataaaataacgccatcgggctgctgttccatcagttcatcataagagatgtcatagggatagaccgtgacattacagtccctttgactcagctggcgtaagacagagtgtttgacacctaaatcaatcaaggcaatactctttccaaaacctggtacagcataggctgtttttgtcgagacttgacgcacttggtttttgggaagcactgtcgctcgcaactgatccaggatatgctcgatcgaatcccccttgttaatgacagtcgccttcatccgtccatacttgcggacaatttttgctacctgtctcgtatcaatccctacaataccagggattttttttcgcttcaagaattcatccaaggtcatctgctgccgccaattgctcggcatatccaccagatgctgaaccactactgctaaacaagtgggcgtaatcgattcagaatcgtcccgattgatccctgttgcgccaataactggaaaggtaaaggagaggatctggccactaaaagcctgatccgtgatcaattcttgatagcctgtcatggctgtcgtaaagaccaattcaccagtcacatataagcctgcaccaaaggcttctccttcaaatacagtcccatcctctaggaccaataatcgtttcatcgaacccctcccttcttttacactaatccaattttatcatagttcctcaaaaaaaggaaagtcagattccatgtagctctctactctgtcctctttctttcctttcaatgaattgtcagttttcttattttgcaccgcgacctttaaggacggcttcaatgatggccatacggacaaagacaccgttggtcatttgttctacgatgcgtgatttaggagcttctaccaagtggtccgcaatttcaacgtcacggttgactggtgctgggtgcatcaagatcgctgtatctttcatacggtcataacgttcttgagtcaaaccatgaagacggtggtagttttctttagagaagagtgattcgtaatcatgacgttcgtgttgcacacgcaagaacatcatcacatctacttcttcaatgacttcatcgatagtgacgaaacttccatagtcttcaaattccgcacttctccattcgtctggacctgcaaagtaaagggttgctcccaaacgtttcaagatttgcatatttgattttgccacacgtgaatgatccaagtccccagcgatacaaactttcaagccatcaaagtgaccgaattcttggtaaatggtcatcaaatcaagcaagctttgacttgggtgttgacctgaaccgtccccaccattgacgatagaggctgtgatcgttgggctttcaaccaattctttgtagtagtccacttcagggtgacggatgacacagacatctactccaagagctgacatggtcaagatggtatcgtaaagtgtttcccctttgttcacagaacttgtcttcacatcaaagtcaaggagatcacatcccaatttcaactctgccacttcaaaggctttgtgggtacgagttgaaggttcaaagaaaaggtttgagatgatgtgttggtcttcgtaggatgctttagctccgtttttgaactcaatcccacgtttgatcaatgccattacttcttcattggtaagagtttccattgagacaaggtttttaagagcgatttgattttcagacatgttgattctccttttataatgtgaatgcaaatagtttataatttgtttaagcttctttgatgaggacgcggtcttgaccgtctagctccaccatctcgacaatgatttcctctgacttacttgtcgggatatttttcccaacaaagtccggacgaatcggcaactcccgatgcccacggtcgactagaaccgcaagactcactcgagcaggacgaccgtgactgaccagattgtcaatggcagctcgaatcgtgcgacctgtatagaggacatcatcgatcaaaatgacttctctatgagcgatatcaactggtaagaccgttgtatcctcagtcgccttcatgtcatctcggaaaggcttggtatctagttctgctacagggacatcgatttgttccagctgagagaggcgttcttggatccggcgagcgatgtaaacaccacgcgtcttgatccccaccagcacaatctggctcaaatctttgtttcgttcaatgatttcgtaggtgatccgggtaatggcccgtttcatcgtcaaatcatcaacgacttctttggttttcattcagtcctccttagttgtaaaagaaaaacctcctttttcaaggaggttcagcaaatgaatggtctaagaggatagagtctcgccctatggtcctagccattgtttttcacagtctccttgcctgcctcacgggacaggattaaaggatttatttaattgagataactatatcacagtttcaaacgacatgcaagaaaaaactcaacatttttcaaaaaaatttaaaaacatgacttttcgtctgaataatgttcggcttttactaagaaacagccgatttccgcttgatatttttaatcccatagagcacatagccagctaagaggtaagcgataaagatgatcaccacccatttgcccacaaaagcccagccgtatttattaacattgataaagaaataggcaaagggactatcttttgcacctggaattggccacttcaagaccaatccattgagaagggcaaagagcatgtaagccaggggaatcgaggtccaaaggaagggatcgagcttacggtattgcttggctttatcaatcactagagtatcaaagaagaacatcaaaggaacgatgtaatgacagaggaagttttccaaacgataaaacttctctggtgtcgcaataggcgccaacataaagtggtagatgacacaggtgatcataatggacatggtaactgcgcctttcatacgaaggtagccctgagtctgggtcgaacgacctcgaaccatgcgccaaaccatgtctcccataaagaacatgaccaacatattggataaaatggtgtaatagagcatcatgccaaagccaccatgcttggtcagttgcagataaacaccgagtacacttaagataaacaatagaaaacgatagctaaataatagtttgaatttcatagtatcctcctgaaagaaaaggggctaggcccttcttcttatctttagattttcttcacaaattctgatttgagtttcattgcaccaaagccatcaatcttacaatcgatgttgtggtctccttccacgatacggatatttttcacgcgcgtaccttgtttcaaatctttcggtgcacccttcactttcaaatctttgatcaaagtcactgtatcgccatcagccaatttgtttccgttggcatcaatcgctacgacactctcttcttcttcgacctcagctgggttccattcatacgcacactctgggcacaccaagagcgctccatcttcatagacgtattcagagttacattttggacagtttggtaagttattcatttttatctccttattcaaattaactttcatagtataccatgaaagcgaaaatttgacaaatcctgctcgactgtagcattttcaagaaaaaaggaggcgacttggcctccctacatagataatatttttcaatcttcctgcaattcttgaatatctcgaatcacgcgcacacctgcttgattctgctctcgcagttcaacatcagagtatgggaaggtattgatcaagatactctccatcccgatactttgggcaacagcgacatctgtcgtaaagtcattccccaccatgaccgttttctcagggttcaactggtgttctttaatgacttccaagaggaactctggctgaggtttacgaatacctgcatcagaggacaagtaaatgtcatggaatagatctctcaaaccaaccaaatcaatctctggattggtaaaatctgcttgggcattggataagagaaagattcggcaacctgcagctttcatatcctctaaaacttctttcgtgtgaggataaagctccaaccgcttgcgagaaaggatacggaaagtcctcgcaatcaagcgtccccactctttgaggtgggcaacactgtttccacttggatgaccttctaaatacaattgcacaaagatgaccgtcagatcaatctctggataggcaacctgcttatccttggcgatttctgcttcagcttgttgcaccaactctttataacgcagtcgcaagccttctcctgtgtagcttgccccgtaggattggtagatctgagccatggtattccataagactggactcgactcatccgtttcgatgtcgaccaaggttccataaaaatcaaaaatatagtttttaaatgcgtacttgtgcggattcatctctcactcccgtaacaaacatggtaaaggttgccttgcagacattgacaccgtcttgattggtaatatctacatccacaactcgagtcgtccgtccactgtggacacattcgccatggatcgtgaggacatcccccagacgccctgctttcaagtaattgatggaggattgcaaggtcacaccatcgaccccctgagaaactacgaccaaaccactgacttgatcacacagggtaaagagatagcctccgtgcgcatttccataataattgagcgatgattccacgaccttggttgtcaccactacatggccatctctcatcttttcgatttcgtaattttcaaatgcagcaattgcatcaaagtgaaaatctttcatatacttgccaccttttctagcatcttttcaactcctctatcatactacaattaaggtatagatacaagcgaaggagcaattccttagaaacagaaaaggagactccaactaagtaagaagacgatactaggaacaatgtattttcgtggatgcttccaacattccctctttaaattccattttcttaaagggaaaaagatttcaataagtaagtgcaaaaaagcttccactactgctagaatcatgactcctagtaaaaatagaatccccaagtcaggcatgaccaccatttttaataatagagcaacaaatagattcacagctaagaaataagtcagcaatactcggtaatacatcaagtaaaagaatcgactcttaggaagggacttaacatgaacaatcaaatctttatccgcggaaatgagggtggttaatggcgtattgacagaagccatcgttaaaagaatgatgatttttaaaggagcatcataatcctgtatcagaatgagaaggaggaagatgagagtaaagacaaaattgatggaaaaatagcgctcttgaaacaaggaaagcaaaaaataattgccacttcttctctttgcgacgagcaactgatcattttttgaaatcgcgaccaggtcctcatttttaaaaattaagacagcaaggagggctgaaagtaagatcatataggacacttgttgaatccataaagaagatgctgtaagaacagtcgttacaaaaatgagcactcctcctagaagacttggcctggtattgaactggataaagatataaaacacactcaataccaccagtaaagaaaggaggaccagcttaaaggattgtagcaggtctaacctgactcctaaaaagaggatcaataacagcacgcgctctagtaaattgagaagaaaggttaccgtcagaaaagaccctttaaaacgattgagagacaaaggaagctggtagtaggcctggaccctgtccatcgaaaagtaggaatacagcaattgaaaggttgatagagcagtaacaatagccgtactgatcaacaagacttgaaagctcgtagaaaattttgccacaacaagatagtaataaagagcaaaggctaaggaagtcaagaacaagaagagccgatttttggataccacatctctaaaaattgctagtagcatgttctaccccctctgacgattgacgtcatgaaaccaatcttctaaattcgattcgatcgcgtctaggtgaccatcttcaatagtataagctgtatcacagacccgaacgatactctctgcgatatgcgaactcatcagaatagagccttcttctttatactgcaatagcaaaccatatagaaattctgtcgcatcaaaatcaaggccatcaaatggttcgtccaaaataaggagggtaggtttgagataaaaagctgtgatcaagaagactttcttcttatttcccgttgacaaactaccaatgtctgtgttgagaaactcttcaaaatgaaagcctgagatcaggtcctgcaataacgtttcatctctctttcgatgatacaaacgacagacaaaattaaaataatgaacaaaatcccagtttaaaaaactattgttttcagtaaaaactgtataggtacggctcttatagaaattcgtatgaaaagaggtcgccttatcttctatggtaacagactcaactgcatactgccgatgatcaaagacactgcttaaagcttttagcaaggttgtcttcccagctccatttcgaccaatcaaccctactacagaatgattgggtacaagcagattcgtgtcttttataacgggcttgtcttttttataccaaacatttagccccttgatgtttaaacactcactcttcatcgacgcactcctttatataggtaagaagccccaaccaaaagcaacagcaaagcgtacaaccattccttttgaaaggcaaagactaaggcaccgatcaagaagcaaattcctataaggattctaaattgtaatttcatatcttgccttctttctattcacagtatgaaagattacaattgtattttatgcttatactatagtactttttctgagcagattcaagcacgaatggaatattctttcttcttttaccttacaagcaaaaaaagctagatacctctagctctttgcttaaaatcttaatttttaccagtcgtcgtctgtccgtttgcgataatagaactcagacaagtccgggtcttccatcacttccagcagaggaagcatgtcgtaggacaagtccaacttttctaattggtccttctcaacccaagaaacttctccttcttcagatgatctgagctggcctgtaaattctgtcgctttgtagcaaaagacaatatagcggcctccctcatctggctcccagtctttgactgcgaccagttttggatctgcaattgtcagtcctgtctcttcgtagacttcacgaatgacggattctacaaggctttctccttcttcgatatggccacctggaaaagcatggccagcccagtgagtcttttcaggtgagcggtattggaggactacttttccattcgtaggatcttctaccaaacaaagattggtaagtacagtagatgttgcgcgtgacataaatttcctttctatgatattgacaattaatcaatataaatttttttctttatctcttttttcatcacaaagggatttaccagctcatggtattcatcataggcatccaaaaaagagcctctctgaaagacaattgacttctcttttaaataatattccgagtgaatcgttaccggaccatggccatcaaaggtaaaaagcaactcaatgaaaaatgctaggatcaggctagcaaagagactcaagagaacactcacaagattcttccaatttggtgcatgttttcgatagaagcgataccagctgtgacatagaatagtcacagcccctagatacaaccagggattccagaggagcggcgtaaaggcacaaccattgaagtccaaaaggaagttagcaaaaacaaaaagcaacaaaatcagatacaagattcgaaacaggttccgatactttctcatgttgatctctctttcttagtaattggtttaaactggatctcctaaagtaacatcaacagaatatgataacctaaccggagccaatgttctataaggggcgtatccggatcattttttttgctgtctaagaatagacttagcgataataaaagtaagctaagtgctataactattttaagaaccaatctcataccaccaagagctaaagaaactattgaaccaattagtggtaaaggggaaaatataaatgccactatgccgaaatagatcttaatcaatgataaaaccaataaaccataaacaacaatcttcgtaaatagagagactcttttatcttcttttttcagttttgaaatgaaatagatgacatagatcatatacataaacagcaacatatttatttcccctatttcccatggattttaattctattttatccaacatccgttaagaatacaaccgcttgcctagaaatgtccaacaaagacaaggacaggatcagagtttcttcacttctgctgcgaccttttggagatgctgttcccgcatgctagcagtgttcacatcccgtccaacctctcccaagatacacacgcgtttggttttaatcccacagtggttcaagacggcatttttcaaaacagagatgccataactatccggaatgttgagaggacctgaaaagatcttataccaccaagtaggcgccatggaggtcgcataaatactggccgtttttccttttagcaacttcttgaattgcttgcctctcaggtaattccagataaagctcccctgatcattagccgagtaggcaatccccggtgtaaagacccgatcaatccatcctttcataaggctcggcatactactccaccagataggataaacaaagatgaaatgatctgcccattggatccattcttgagaacgaaggataaaggaatcttcctccatccgctttcgataaccatagcgaaggacaggatcaaagtcctcttcattgagattgatcactttaagctcgtggtgatttgagtcaatagtttcgacaatggtttgaaaaatagcctgacagtaactttccttatctggatgcccattgatgactagaattttcattcgacttctccttcatttctttagttcattctatctcttttatttttttacttgattaattgataatgattcaaagattgatagatacgttctttaagaattattatttgaagaacacatcatccgcaactccttaacaggttttccaagttcaagtattttttcttgaccatcaaaagtaaaacccattttttgatagaaagcaatggctcgcttattatctttcaaaacccataaataaatttcagagaaatgatcgagagcagcaaatgcagcatgcattaactgtttactcacaccttttccatagtaatcttttaaaacatataaggcgatgatttcaccagcttgaatggcttcatcacaaaaatttccatagctgataaatccaacgaccttctttccatccatcgcaatcaaggtattttctggatacttttgactaaagaaacgacatctatctaatgtcatcgtctcctgatattccgcgggtaaaagattgtcataagcctctctccacgtttgccaatgaacgagagattttccttctatctcttcaggagtttccattgttttaatgataatcttcattcttccctcctttctaatccaaggccttcacttccaacatcatatcgcggatctgtgctgccaactcaaaatcaagcaattcgacggcttcttgcatttggccttgcagtttcttgaccagttccttgcgctcttggcggttgaggctggtgatatccacttccttgtcctcttccttagccacagccttggtaacagagatgagatcacggatttccttcttaatggtttgtgggactattccatgctcttcattataggccatttgaatctgacgacggcgggccgtttcatcgatcgcacgttgcatagactgggtcatggtgtccgcatacataatcacgtgaccctcactattacgggctgcacgcccgatggtctggatcagtccgcgttcattgcggaggaaaccttccttatccgcatcgagaatggccaccagactaacttctggtacgtctatcccttcccgaagcaggttgattccgaccaagacatcaaaaacacccagacgcaaatcacggatgatttctgtccgctccaaggtcttaatgtccgagtgcatgtatttgaccttgacacccatttctttaaagtagtcggtcaagtcttctgccatcttcttggtcagggtggtgacaaaggtccgctctccccgttctacacgcgcattgatctcacccaagagatcatccatttgccccatggtcggacgcacttccacctcgggatcgagaagacctgtcggacgaatgatctgctcgatgatagtatcggtttgttccatctcataatcacccggtgtcgcagacacatagacaatctgatggacatggctttcaaactcctcccgacgcagtggacggttatccaaggcagacggtaaacggaaaccatagttgaccagcatttccttacgagaacggtcgccattgtacatgcccttgatctgtcccatggtcatgtgactttcatcgatcataatgagaaaatcttctgggaagaagtcaagaagggtgtagggaggctctccttcactccggccatccatgtgacgggagtagttttcgaccccattggtgtagcccatctcccgcagcatttcaatatcatactcggtccgttgttttagacgttgagcttctagcaacttcccttctttttcaaagaccttcaactgctcttctagttcagcctgaatcttggcaatggctacttccatatggtcatcattggtcacgaagtgagtggctgggaaaatagccaagtggtccacttcaccaaggacttgacccgtcaaagcttcaacctcacggatgcggtcaatttcgtccccgaaaaactccacccggaaggcatgttcatcacgcgaagctgggaaaatctcgaccacatccccacgaacacggaatttcccccgttgaaagtcgatgtcattgcgctcaaactggatatccactaggtcattaagcagtttatcacgagaaatctccagacctgggcgcaggctgaccacgctgtccgagtattctttgggagaacccaaaccatagatacaagagacagaagcgacaacgatcacatcgttacgctctaacaatgctgatgttgctgagtgacgaagcttgtcaatctcatcattgaccgaactatctttttcgatataggtatcgctagagggcacataagcttctggctggtagtaatcgtagtaagagacgaagtactcgaccgcattttctgggaaaaattccttgaactccccatagagttgccctgctagggttttattgtgggcgatgaccaaggtcggtttattgacttgggcaatgacctggctcatggtataggtcttccccgtaccagtcgcccccatcaggatttgggccttttctccaccctcgatgttatctaccaactgttcaatggcctgcggttgatccccagacggttggtatttcgatactagtttaaatttgttatctgttactcgattaatcatctctttgacctcacatatatagactttattttaccataaatcactagaattctctgagatgaggaatgaaagggaaaacaacatattacaaaataattaattggacacgcattagagtgaaaactaaacaagactctcgcaattacttcgaaagtcttgtcttttattctaaaacaatgcaatacgtaataaacttcagtgtccatgatatacaaaattagcaaggtttgctcatcggtatcatttttacgaaatcaatttactacttaacttcttgattccttatcaaaaggtaaagagtggctccaagtgaaaacaccaattccatagcataaacacatagttgcaaataggaagctctccctagtattgtatccgcaataatattgtaaaatagataactagtcattggttccactactctttctatgaaaggttgtaccaaaataggaaatagcagcaaaatagctaaactccccattggacttttgaaaaaataacttaagaagtaagaaatcaaaaaatattggatggagccaatcaaatagaaactgaaaagttctaaactgacaccattttcgctactaaaaaaatgaaaccatataagcaatacaatgaaatacaaggttgattgtagtactacatcacataactctacgaacaggatcctaattgaacttaagatcctttttccacttaccaaataaactagttttgtttcgtgtgattgtaactcaacaaatgcattaacacaccctatactaacagagagcattgaggcaaaaacaagagcttgctttatagataattgtacaacagtatcattgattgtaactggtaaaacacttaaaagacacacaaaacctatcaaaaatgactgtatagttatctggtacttcacgggttttaaactatattttttgatgataagacttctaaataaacttgccattcttcctccccattcgaatcttttctacaacaattatcaatactaagaatacgactccttcaacaactagaagagtaaatccatacaattgactcatttgagtcccttcaattcgaccaaaagcaaatgatttagccccaatcaaaggtaacagattctctatgttagaagaaattcctcttagaatacctgataaggtgattaccaataataaaacgtctgcaattaatgcagtcattgattttttcgttacgattacgaaaagtaaagctaataaagtaagaacgattgcaaatatcataactcttaccgtgacgtctaaaaacaatgtcaattctaaaaaattctttagagttgaatctagaaaaacgaataaaataacagcgtttactatagaaaatattaaagtagagagtaacgataggacaatcgaacttgcaataaacccagtaagacgaactttccagttaggaatcaataactggctaaaaaaatcatcaccaaattgataatgggttgaataaacaagtgaaacaagaattggcaagaaaataacacttgcttggtagggtgaagataagagagcatccctgactgtatacactggattcgatgataacatagatggatcaaggttaaccgcttggccatttccttctgctaaggcatttatcacctggatattttgaattgtaaaaaatatgctgactcccaaaataagaaaaaaagtaactttaaaagtaggtaaactacaatatttatagaggtcactaaaaaaggaacgcttcaacatattatgcaccttctttcccttcgagcgccttaaaatatgcttcctcaaaagatccaaactctttcaaaatgtcttttgtaggagcatcaataacgattttcccattagaaataccaaccaaatgatctacagttaattctaactcactcatataatgacttgtcattaagacagttttaccttcattgacaaaagattgtaaaaaattacgtacccagcgaattccttctggatctagtccattgattggttcatctaaaattaagatgtcaggatttgctaataaggctgttgctaaaccaagacgttgcttcattcctaatgaatagtcttttacttttttatttttagcttcacttaaccccaccaactctaaacattcgttgcacctatttttgtcaacaccacaagccaagccaatccaccgaagatgctggaatcctgttcttgttgggtaaggttggcaactatcgaggaatgatccaacaatacaaaaaggattatctcccaattgagagtattttttcccgtcgatcaacgccattcccatttgactattttctaaaccaagtaaaattctaattaaagttgattttccagatccattcggtccaatcaatccagtaatctcacctttcttggctttgaaagacacgttttgaaggacaattttattattatattccttatgtagcttttgaattgttatcattcattctttttcccttctgacttttagtgaaattccaccttcacttgaagcaagtataacaggagaaaatcaggaaattatcagaataattattttcttcatttctaacaaattacaatccatatttgctataatatgctcatataattggagggactatgaagtataaaattttagccattgacgatgatgaaaaaatcttacgattaatagcgaatacattaaaagcgaacaactttcacgtggaaactcgtaaaaatatagaggagatcaatatctgtgactttactggattcgatctaattttacttgacgtcatgatgcctatttctggtttagaaatctgtcgttccattcgttcacaaattactactccaattctatttctaaccgctaaagattttgaagaagatttactaaaaggaatacaagccggagccgatgattacatcacaaaaccattcagcataaaggaattgattgcaagaattcaaatgcatcttcgtagggaagaaagatctcacaacgcctctaaagaagagatggagtcaaatataactttttatcgagatagtcaagaagtttattatcaatcaaagagaatttcattgaccaagagagagtttgatttactttatcttttagcaaaaaataagaaccgaatatttagcatagaagaactttacaattacctctatcctgtagactctgatgcacaactacgatccattactgaatacatctatcaaatcagacaaaaatttaagattcatcaaattgatcccatcaaaacagtatggggaggaggatacaaatggaaaaagaattgactatcaagcaactcattaagcgtaccaaccttaaaatcatttggcaatttcttctatgtctgatacttttttacatagttccagctcttctatcttctgtatctggaataaatgagaataatgccaatcaatttgctttattttttagcgttagttcttggatttatctttgcatcattttaatttttatcattgtaatgaatattagacaattattaaccaagattcaaaaagaaatgaacatggtttatcatagtggtctatatttcactaaaaatgaacatcaccatttgcagattaaagaattcattgaaacaaatgatctgatcgaaaaaatgcaatctgatataaaaaatagaattcaaaatgaaaaagatcaaaaaaaagaactcatgtttcaagtatctagtgctgcacatgatcttcgtagccctctaactgttatcagaggaaatgctgaattcttacaatccaccgagcaaacacctcaaacaatggaatgtcttaaagaccttgagcaagcaagtattcagttaaacgattattttaaccacttcatccaatactccaaaactttttatgaccatgatattcaacttgaaaacatatcaattcaacaagtaactcatcaattgaaggaacagatcactcctttactcccgagaaatacacaatttgtttttactaacacagtaacttcatcggcacaaattgctattcattccaatttattttttcgagcaatcaccaatattattaataatgcaatacaacatcaaaaagaaaatgatgcaaagatccagctaacaatgtcacaagaaaataatcgattagttctaaccatatggaataatcaatctactttttcaaaaaatgtattacaccatgctggaaatcttttctataaagaggaccaagcaagaacaccctctcaagaaagtcactttggacttggtttatctttcgtgaaacgcgtcatgaaacttcataatggaactatgcatttagaaaatattcataatggtgcacaagtcaagctaatcattcccattattatatagaaaaagccgaactcatcaatatgtgttcgactcagaaggcagacaaacgtcatttttggtgtttgtctttttcatatatgactttcagacattacacagaggttagtcatcaaacttttctttcctctcccctaagcgatagacaatcactagggatacaagaagaaccagagtggtgatgatcgatccttctgcaccaaatgcccctccggtcaaccagtcaggtccatctcccatggtaaaactaaagatagatgcatctgcgcctgtgccactgacttgaaaaccaaggagatttccttgtacatagttccaagttccgtgttgggcgaccactagccagatactatccgtatagataaaaagcagaccagccagcactccatcgaggatgatattcagaacggataagaaggtcactcctgcatttcccatatgcagaatgccaaagagactactagaaatcgcgatcgctaaaggcagattagttcttgcagcaatccgagtcagaagccaacctcgcgtcgctacttcttccgtccccccttggaggagccaaaatggaaataatcctaggataaaaagcaagggctctaaactcagcacatttaacacaaaagacccgattccactgacttggtagacaagcgcaatcactcccatttgaacaagtgaaatcatgatcccccagcctagatacttgagccaatttctttttacaaagcctaagcttgataaagcattcttctctatgaccttcacccaaaaaataaagagaaatagtatgattacaaaactgaagagctcataatagagaaaataatggtagaaaaattcttgaatacttgctgtcccatttcctggcgaaaagaactccactagaaaacctataactaaggaaaatggccccacaagttcactaccaatccaaaggcctccttctataaagagagatgctaataatacatagaatagtgtagaaataagaactggccatgaggtgttagtttttatatcctgaatgatctttcctttcttcatgatcaacctccatttatctaataggtccattgtaacaaagaaaatccggagctacaagatcaacctatgttagataatctaacatcaaaactcaattttcttgcagaaatgacttttttctgatataatagcttctgtagaaaaacataagaccattcatactcgttttggtatgaatgatttgtttttttaaggccatcctttggtcaatgtgctcatgggttaaatccccaaagagaaaagaattagaaggagactgaaatgaagaaaaaattactagcatgtttgcttttcttatttccattcgttgcattcgctggtcatgctcatgctgaaacgatcaaggtcgttttcgacacagcatatgcaccgtttgaatttaaggattcagatcaaacctataaaggaattgacgtagagatcctggacaaggtcgctgaaatcaatggctgggatttggacaaatccttcccgggatttgatgcagcagtcaatgcagttcaagctggtcaagcggatgccatcatggccggtatgaccaaaacaacagaacgtgaaaaagtcttcaccatgtctgatacttactatgatacaaaagttgtcattgcgactaaaaaagctgacaaaatcacgaagtacagccaattaaaagggaagacagtcggtgtcaaaaacggaactgcagcccaacgcttccttgataaaaataaggacaagtacggctacaagatcaagacttttgatactggtgatctcatgtacaacagtttatcagctggtgcagtcgatgcggtgatggatgaccaacctgttattcaatacgccatccaaaagggtcaggacctagctatcaatatggacggggaagcagtcggtggctttgcctttggtgttaaaaaaggtggaaatcatgaaaagttgatcactgaatttaacaaggctctcgctcaaatgaaagctgacgggacacttgatgagatcatcaagaaatggacaggtgaaagtcaatcatcaagtaacagtgctgttccagaaacaactactcctgctggtcaaaaagcaactcctaaaaaatcaaaatatgtaatttcaagtgactcatcttttgcaccatttgtcttccaaaatggaaaaaacaaatacacaggaatcgatatggacttgatcaaggctattgccaaagaccaaggatttaccatcgagattaataatcctggatttgatgcagcggtaagtgatgtccaatccggccatgcgcaaggaatgatcgcagggatgaccgtaacagatgctcggaaagaaacatttgatttttctgaaccatactacacggccaattctattctagccgttcaagaaagcagcaagattgattcatatgatgacctaaaaggaaagacagtcggtgttaaaaacggtacttcctcacaaaacttccttgaagaaaaccaaaagaaatatggttacaagatcaaaacgttctctgacggagcttctatgtatgatagtttgaattctggttctgttgcagcgatcatggatgacgaacctgttatcaaatacgctattaaacaaggacgtaaattcaaaacacctatcgaagggactccaagtggtcaactagcatttgccgttaaaaaaggtgaaaatcctgaattgatcgaaatgttcaataacggtcttgctaacttgaagaaaaatggacaataccaaaagattctcgataaataccttaaaacagatagcaaatcaagttcttcaagtacagccgcagatgaaacaaccatctggggcttgcttcaaaacaactacaaacaattgttaagtggtttgggtgttactcttgctcttgctcttctctcctttgccatcgctatggtgatcggtgtcatctttggaatgtttagtgttagtccttataagtggctccgctggactgcagaaatctttgtcgatgtcattcggggaatcccactcatgatccttgctgctttcatcttctggggaattccaaacctgattgaatctgtcacaggtcatcaatccccaatcaatgactttgtcgcaggtaccattgccctctccctcaatgctgccgcttatatcgctgagattgttcgaggagggattcaagcagttccagctggtcagatggaagccagtcgaagccttgggatctcttatggtaaaaccatgcgcaagatcatcttgcctcaagcgacgaaactgatgcttccaaactttgtcaaccaatttgtcattgcactaaaagatacgaccatcgtgtcagcgatcggtttagtcgagctcttccagactggtaagatcatcatcgctcgaaactaccaaagtttcaagatgtatgccatccttgccgtcttctacctcgtgattatcaccttgctaacacgatttgcaaaaaaattagaaaagagggctaactaatggctaaattaaaaattgatgtccatgacctccataaatactacggtgaaaatgaggtcctaaaaggaatttcaacaaaattctatgaaggggacgtggtttgtattatcggaccatccggttcaggtaaatcgaccttccttcgtagtctcaatctcctcgaagaagtgacaaaaggtcaaattacagtaaatggctatgatctaaccgatccaaaaaccaatgttgatctagtccgtgaaaatatcggaatggttttccaacacttcaaccttttccctcacatgagcgtccttgaaaacattatgtttgcgccagtagagcacaaactgatgacccgtgaagaagctcaaaaagtcggtatggaattgttggaaaaagttggactcgcagataaagccgatgccaatccaaacagcctttccggtggtcaaaaacaacgtgtggctatcgcacgtggacttgccatgaatccagatattatgctctttgacgaacctacttctgcccttgaccctgagatggttggagatgtattgaacgttatgaaagagttggcagagcaaggcatgaccatgatcatcgttactcatgaaatgggatttgcccgccaagtagccaaccgcgtcatcttcacggctgatggtgaattcctcgaagacggcaaaccagatcaaatcttcgacaacccacaacacccacgtttgaaagaattcttggataaggttctaaacgtttaaaaaaatagtggtttttgaaacatctagcaattttgctagatgctttttttgacgaaaaaagcattttcaaatctgaaaatgcttagattgaagataaagacttattaaaaaccttcctaaggtgagtacggacgtcagcgaacttctgcgaagttccatgactaattattgagcctaaggtctcaataattccgagtgctagaaacaaccgtgtttctagcacttttctcacggcggaaagttttaatgttttcttaattcgttatacaaattggaacatatatttatttctttgcagaatcactttacttattttactttaaaaataatttgtctacattttaactaatctgttgctgagctgtctgcatcttgtagtaaacaccttgcgcttgcattagctcttcatgagtaccatgctcaacaatatcgccatctaccattacaaggatcatatcagcattttgaatggtcgacaagcggtgagcaatgataaagctggtccgtcccttcatgagctgattaaaggcatcttgaatcaagacctcagtccgagtatcgatggaggatgtcgcctcatccaggatcaaaatcttaggaactgaaaggaaaacccgagcaatcgttaagagttggcgttgaccttgggacaaagactctccagcatctgaaagataggtatcgtacccttgtggcaactgccgaatgaagaaatctgcattggctgctttggctgcttctatgacttcttctctacttgcatctggacgagaaaaggcaatattttcatgaatggtcccaaccttgagccaggtttcttgcagaaccataccaaactgttggcggtaagaagcacgggtgtagtccgtaattggcaccccatcaatcgtgatctctccagaattaacagggtagaaacgcatgagcagattaatcaaggtcgattttcctgctcctgtaggccctacaatggccactttactggcagctggaacctgaatggttaaatctttgatcaaagtccgccccaaatcatagccaaatgagacatgctcaaaaccaatcgcacctttgacatcctgactttccaggacccgttgccccgtctcttcgacctcagcttgatccaagacgctgtacaagcgctctgcacaggcaagggcactttgaagttctgacaagaccgaggagatgtcattaaagggcttggtgtattggttgacataattgaggaaggtcaccaattgaccgacagtaaagtgagatcccgaaataatgcgtacagcaccaaatccagccactactgcataaatcaaggcattcacaaagcgagtggcagggttgacagttgaagaataaaagacagcggattgggaatagttggcatagctttcattcgtccctttaaaggccttacggaattgatcctgagcattaaaggactggatcaaactttcctgggtcaaggactcttcgatcaactgagtttgaagaccacgcgccttggtctgcttttggaaaagcgtataagaacgtttggcaataaaacgagcaatcaagagagacaatggggtcaagaccagaaccgctaccatcataaaaaaatccaattctgccatggtcacgatggtgacaagaatggttaagaggccaacaaagaactggttaaaaaccatcagaagaccactattgagttgctctacatcggtcgtgaggcgactgacgaaatccccactcccttgcttatccagataagacaagggcaatcggtgtactttttccatcacttctgctctcaggctttggctaaaccgatagaccaattgattgtagacaagaggattgatccattggatcaaggtattggctacaatgaccagaaccatttggatcaaaacgggccataagactgtcatcccttgaggattgatgactaaatcaaccgcatgtccaatcaggatcggtaaccaaaccgttaaggtcacttgagcgacggttcctatactggcaagaatcaggagtccgggatggtgagcaaaatctctaaacagacgttttacataactagaacgtttttgactcatgcttcctccctcctgtgttgtgaataatgaatttcttgataaatctcattggtagacaagaggaaatcgtgatttcccagtccaacttgatgtcctttgttcaagaccaaaatctgatcagcagacttgagactattggttcgttgagatactaggatcaaactcgtatcactcaattcttctttaatcgattttaagagacgagcttccgtcaaataatccaaggcggaggtcgaatcatccaaaatcaagaaaggagccttcttcaaaagggcacgcgcaatggtcaaccgctggcgttgaccacctgagaaatttcgaccaaaggcttccactggctcatcgagttgtccttctttttcacggacaaaatcagccgcctgagctatttctagcgcccaccacaaatcatcatccgatagaccttcttccatccctagtaagagattcgagcggatagtccctctaaagagctctgccttctgtgggacaacagctacccactcccgccactccttgagagttttaggagagtgaccttgatgatagagggctaatttcccctgactcacggcatacaaatgactcaataactgaaccagggtggacttcccagatcctgtaccaccgataattcccaacatctgtccatgatccagatcaaaggaaatatcttctagagctgggcttgaagccgttggataagtgaaagaaactttctctgcgctgatcgcttcttgctctgttgcagtttctactggcaaagcttctaagaggtcttcttccttcaaatcgaaaatctcttgcacacgcttggctgaaatatagctgacatttaaagacgtgaccagcatcgccagcttgatcaattctgttaaaatttgtaataaataattgaccaaagcgaccaacatcccttgggttaaaagaccagcagagatattcaattgtccttgccaaatgacacaaaccaaggtcgtattgaccacaaggaaggtcaagggactcaccaaactagaccagataccagcgcgaatttgccagatcttgtagtcctgattgacctctctaaaatcctctaattcactagcatcttgtccaaaggctcgaatcacccgcatcccttgaaattgctgacgcgtcaccgtaaccatccggtctgtgattttccgaatcttagcaaagagcggattgacaatccgagacatgatcacaataatcaaggttaaaatcgccaccatccccaagaaccaaagggttagtttaggactgatggtgaaagccatgatgatagaaccaaagacaataatcggtgctctcaaaaagaggcgcaagaattggttgatcccaacctgaatttgataggtatcagaagtgagacgggttaccaaactagaagtcccgatcctatcgcgcttgtcctttggaagtgataagatcttctcatacaaatccttggtcatctcgcgggtaaagccgacagctgctttagaagaaaaatactgggccgtaatagctacgacgacaccaaagctcgcaaataaaaacaaaacaccgaccgtcatcaccactgcgctcgtttcctttttcggaatgacctgatcgactaagtgggcgatgattaaggggacacacaattcaaaaatagcttctaaaagcttaaacacgggccctagaaaagtttcccatagatagcccttaaaatacttcaataatgatttcatacaactcgattctttttaaataggatatacctattttaccacaattataactgacaaaaaaactctccctgcagagcagagagagttgaatactgaccagatgaaggtcagaaatcttattccttccttggcaccttgcttaaggtcttgcccattttccccaatccaatcattagtagagggaaagataatagcgttataaggcctaatacaagaaagactgctacaaatccacaactatcaatgaaccaaccagtcagtgggaaaatgacaatcatagatagactaaacatcatcgaattgatactcagcatggttgctcgcacactggaaggcagataagcttgtaaatcattgtagtagatgggttgataaacggcataaagggcattggtcaagagatagacactcaaataggcgaatggagtcttcgcacctaccaaaaacaaggccaaccctgtcagtgcaaccagaatcggaaagacttgattactattccattttttcccgatttgactggccaaataaaccgccaggagattgaatccactaccaattaacatgatgagcgaaacttgccaactggctaagtcactgattttctgttggtagtaaaaataaaacatacacatgatggtccctaccaactgataggtgagcatccagtaaaacaagactggtttttcctgccattcttgtttcactacctccaatatccgctttaaggtcaagtgacttctttcatcactcttgctctctggctctttcattagaaagatcaaaagaatggaaagcaaggatagcccgatagcaatataataggtccaagccaatgctccgtgaatcaagaagcctgccaccactgtacctaacgttcgggtgacttcggccaccccagacaaaaagctagaaatctgaagataacggtccttttggcccgcttctactgctgaatcaaataagaaagctgtactggtccccgagtcaaaattataagaccaagcattgatcatcatggcaatggcatagatccaaaaattcccctgaccaaataaaatcaagatcgaagatccaatactggacaagcgagccaagtagagattggtcttgtagctaaagcgatcggctagcattcccgatgggatctcacacaagagactcgtcccatgaaagatactctctaataaaccaatctgaagcaaagaaagaccattttgaataaaaaagagaatccaaaaactggtgattccaaaataagatgtaaattccagacctgctaggagtgaaatattgcgtttgtaagttcttttaaacattgtttttcctctttcaatagattatataagtgtttctaaaagacttacttagatttgcctacatcttctccacctccttcattttttcttgatccatttcttgacgcagctgggccacttgattagacaaggacaccaacaattcggtttgcaacttttgaatttccagtaaatccgtctggtcttgttgcaccatatggtcaatcttcgtatgcaacaagcgaatttcccgttcagattccatattgacgttaaagtcatttcgtgcttgcaagcgatcgtaatctgccgccctgttttggctcatcatgatcaaaggagcttgaatcgccgcaatcgtagaaagtgctagattcagcaagatgaaaggataagggtcaaaattccagccaaagggatgcaagacattaatcaacatccagatagccatcatcaggataaaactaatgataaaagtccatgacccaccgaagcgcgcaacagaatccgccacccgctgaccgaaggtatagctggctgtcaagcggtcttcaacgttaaaggggcgctcgctttcgggcatgacacctgtcacctgctgtttaatggcttcgtttttatcattggcacgctcaataatctgacctagataatccatacaatattggctcaaatttttatacgtgataaaatcatccatttgactttccggataggatgtcttgagcatctgttgaatggaatggtccagatccgcaatcaaagatccttggccttcttcgtattctttcccatcaatgatgtctattttcagcattgaaattcctttcatagttttttgaagcagataaaagtgaaaaacgcctaatggcgtttttacgtctattaaggtttaatacggtgcaacatacgtgggaatggaatagcttcacggatgtgttttgtaccagctgcgaaggttaccatacgctcaatcccaataccaaatccaccgtgtggaactgtaccgtatttacgaaggtcaaggtagaattcatactctgtacgatccatgccaagttcatccatttttgcaacaagggcatcgtagtcttcctcacgcatagagccaccgatgatttctccatagccttctggagcaagcaagtctgcacaaagcacgcgctctggatttccaggaactggtttcatgtagaaggccttgatagctgctgggtagttcatgacaaatgttggcacaccaaagtggtttgaaatccaagtttcatgtggtgagccgaagtcatcaccatgttccaaatgctcataatccgcatcttcatcattttcatgctcttgcaagagatcaatggcttcatcataggtgatccgtttgaatggttcagcaatgtagcgtttcaagagctctgtatcacgttccaaggtttccaaagcttgaggagcacggtccaaaacaccttgaagcaaagctttgacataagcttcttgcaagtcaagtgactcatcgtgtgtcaagtaagagtactcagcgtccatcatccagaactcagtcaagtgacgacgagtcttagatttttcagcacggaatactggaccaaagtcaaagacgcgaccaagagccatagcaccagcttccagataaagctgacctgattggctcaagtaggctggtgttccgaaatagtctgtttcaaacaattcagttgaatcttccgccgcatttcctgaaagaatggggctatcaaacttcatgaagccattcttatcaaagaactcataagttgcatagatgatagcattacggatttgcataacggcaacttgtttgcgtgaacgcaaccacaagtgacggttgtccatcaagaagtctgtcccgtgttctttaggagtgattgggtaatcttgagattcaccgatcacttcgatgtctgtaatatccaattcgtaaccaaatttagaacgctcgtcttctttgacaataccagttacaaacactgatgtttcttggctcaagcgtttgatggtatcaaatttttcaagccccacttcttccccaaatttttcaataaagtttggtttaaaagccacaccttggaaaaaggcagtcccgtcacgcaattgcaagaaagcaatttttcctttaccagatttgttggccacccaagcaccgatggtcacttcttgaccaacatagtctttaacttcgatgatagtaatccgttttgtcatcattcatcttccttttctcgttaaacttgtccgaagacattatcttctttattgtatcataaaaaggcttacagtgctagattctacctgtgaaaagctgatttttttacagaaaaagatcctcagctcaatgctaaggatccgatatgtttaattttccataaaggccttgagtcgacgaacagcttctttgagggtatccaaatctgtcgcataagacaagcgaacattttcaggggcaccaaaacctgcaccggtgacgagagctacttcagcttcttccaaaattgctgtggtaaattccgtcacatccgtgtaccccttcatctccatggccttcttgacatttgggaagagatagaaggctccttgaggtttgatggcttcaaaaccaggcacttcattcaacaaaggataaatagtattcaaacgctcctcaaaagcttggcgcatgatctcaatagaagattggtctcctgtgagggcttcgattgcggcatattgggaaacggttgttaagttggaagttgtttgactgatcaccttggccatggccccgataatctcaggatcccccactgcaaacccaacacgccatccggtcatggcataggtttttgaaactccgttaatcacgatggtttgcttgcgaatcgcttctgacaagctagaaattggcgtgaaagtattgccattatagaccaaacgaccatagatatcatctgccaaaatcaagatgtcatgctcaacagcccagtttccaatcgcttctagttcttctttgctgtagatcattcctgttggattggatggtgaattcagcaagacaaccttggtcttgtctgtccgtgctgcttccagttgctcaaccgttgctttgaagtgattttcttctgttgtttggaaagtaacgggtgttccttcaaccatcttgacctggtctacataagagacccagcaaggtgttggaatgatgacttcatcacctggattgataacagaagtaaagaatgcataaagaataaacttggcgccagtgccgaccactacttcattgcggctgacagcatagccataaaactctttcatatagtcactaatggcatccttcaattctggaagtccagacgctaccgtataaaagctagcccgaccgtcctcgatggatgccactgctgcttcttgaatgttttttggagtcgcaaagtcaggttgaccaagcgttaaactcaagatatcacgaccttcagctgccaaagctttggcacgagcatttgcagccaaagtcacgctttcttccatttccaatacacgatttgataatttcatatttcctcctcaaatcttaaaaaacaccggtgactttcccagtcttgaaatccaccacataataagagctcccagccttgacttcccagatcggtttgcctttaaagcgtccaaaagttaccccatcaatcgcgtcctgactcttctctttgacgacaaaagctgcctctttagaactaactccttctttcaaagggtaagtatagactgcatcatccacctgccctactaagaccgctagttctttcccctcttggtccttgccaataaaggaaagataggcttctttgccatgaaagaaactctccgtctcaatggtagcaatcgaagagtgcgacagcgctatgtttcttgcttgtgcaatttgatcctgcatgcgatcagaagttttttcagcaagaaataaccaagaaaaaagcaccgtcagcactaagatacagactcctattatatgttgccatatgataaaaagattatttttctgtttcactcccccattatacaccaaacctacctagaattctatagattttcaagaaagaattgttactaatatttcatacctgttacaatgttttagtataaaattgtttgataaacaaactaaaattaacaccttgtatattttatgttcatagttcaataaatttgtcacaattttgtaactaatttgaaaataaaattaaacgacagaaacactatttattgataaaatatagatatggaaaatttaaagagattattcaaagaagcaaacgtagatttaaaaaccatgatcgtcttccacaaggcagaacgattgatccgtgcgtctgaggctcatatctttaaaaagcaccagttgacaccaactcaattctctgttcttgagaccttgtacagcaagggcgatctccgcattcaagatctgattgatagcattcttgcgacctctggaaatatgactgtggttattcgtaatatggtccgcgatggttggattacacgcgaaaccgatccagaagaccgccgtgcatatgttgtatctattaccgatgccggtcgtaaaaagatcgaagaagctcttccagatcatattaaaaatattcaacgcttgatgcaagtctttaatagtggcgagcaagctgagttgacagaactcttgaagaaattcaaacacatcgcctaatcctactgctcaagacgattctgactccaaaatcctctattttggagttttcatcgtgcattctctttatctaacagatcaaaaactattcctgatgcttctcaggaatagttttatttattctttcacaaagatccattctttctcttgtgataaatcctcacgataagagaagcctgctacttctagtgatttcagatcttctagatgggtgatttcttccttcatcatggctgtcaccatagccccacgtgctttctttgaaatcgttgagtgaatctttagtgtcccaccacgattctccataaatttgatccgaatcattcgctcacgaatggcttttgaaaagacctgttcaaactcagaagacaaaagggataagatctgctcctcaccttctactgcctgatcatagtcctctttccagaatgcctttagagattttccagctggttttagcttcatcataaaatccaagcgatggggcgcaatcccttcataggcaggtagcacaccgtataaagcagtcgtgatcaacaaatgttcctgaagataagcctgctctttttcagataagtcttgacgctcgatactacggtacataaggccatcaaacagttccaaagcaggataggttttagcactcccagctaacagagcctcaattctttccttttctactagggctctttcttctgagatcccgtaaaaggtcgctaattcttctagggagaattgtttcaaagcttggaggatggtttttgtgttctctgacaagggttggggctcgacgatacgagcctgttcgttcagttctttagcggatggaattaatagtttcatagttctattgtaccataattttcaaattttcttgacaggagtttttattaatgttattatctagttatgaaaactagattaaagaaaggtgaagatttagtgtccactttttcctatccaacgtgggagcaactgcctgagctagacctctatctcgatcaggtccttctttatgttaataaaacctgtgcacctgtcctctcttcttcagacaagggcttgacagctgccatgatcaacaattacgtaaaacatggttatgtcgaaaaaccagaaaagaagaaataccagcgtagacaggtagctcgcttgatcgctattacaaccttaaaaacggtcttttctattcaggaaatcgcttctaccttaaatttcttgcaggaccaggcgagttcagatcttctctataatagctttgtcgcttatctcaatgagcaaaaagagccgatcgctcccattattcgctctgcctgtcagacggttcaactttatcttgaaaccctatcttatattcaaccatcaaatacggaggaagaaactgatgaattacaccatgaaactaagtaaaaaattatcttttggagaagagatcgccaatagtgtaacccacgctgttggagccctccttatgctcatcctgcttccgatctcagcagtctacagttttgagcaacacggtcttcttagtgcttttgggacttctatttttgtcattagcctctttttgatgtttctgtcttcgactatctaccatgccatgtcttatgattctcctcaaaagtatgtgcttcgcattatcgaccattccatgatctacattgcgatcgcaggcagttacacgccagttgtcctcaccttgatgaacaactggatgggctacagcattatcttaatccaatggggaaccactatctttggcattctctacaaaatctttgccaaaaaagtcaatgaaaaattcagcctagctctttacttgatcatgggctggttggttatctttattattccccaaattgttagtcaaactaccccgatcttctggggactcatgctcatgggcggtctgtgctacacggtgggagctggcttttatgccaagaaaaaaccctatttccatatgatttggcacctctttatccttgccgcttctgcccttcagtatttagccatcgtttactttatgtaatatgctcaccactcttcagagtggtatttttgtgattatttctgtacaatagaaaaaaactgtatggggacagtcaaaatgaagacgagcaaataccaagaaattattcatgttctaaaaaaagccattcaagacggagaactggtgaccggtcagaaaattccctccgttcgccagctagctagtcaattttcttgtagtaaggatacggtgcaacgggccctgctggatttaacctaccagcactttctctacgcaaaacctcaaagtggctactatgttttggagcaggaacctgaccaacatgaggatcttccactaaaattagagaaagaccgcaaccaggcttttgaagatttccgaacctgtatcaatgaaaccttgattggtcgtgagaattatctttttaataatttttcagaccaagcagggttaccagaagtacgccaatcgattcaaggcttattgaaggaagaaagcatttatacgactgcggatcagatcgttttaacttctggtacacaacaggcactcaatatcctcatccaaattgactttcccaataaaaaatctcagatcttgattgagcagccgacttatcatcggatgaatcaactcttagattcgcagcaacttgcctaccgtaccattcaacgtaatttaacgggaattgatctcgaggagcttgaagagattttcaaaagtggccatatcaaattcttctacacgatccctcgttttcactatccgcttggccatagctattcgaccaagcagaaagaagccatcttgcaactagctgatcaatatgatgtctaccttgttgaggacgactatctgggagatcttgatggcagcaatgctccatcttttcattatttggatcaaaaggaccgggtcatctatatcaaatctttttcgaccaatctcttttctgctcttcgcatcacttccatgatccttccccaagcccttcttaagccggtcttgacctataagacgattctggactatgatagcaatctgatcatgcaaaaggccttgagtctctacattgataacggtatgtatctgaccaataaaaagcgactcctagccagaaaaaaagaggaagaagctagtctaaagaccttgatggcccagtctcctctacctcatctgaccctgacccacgatgggatccttttagaactcagccaagttcaatctcttgctgccttaaaacacagtggactcccgcttgatttctttgaagtagcctacatcactgcttgtccttatcaactcgccaagatcaaatcagcagatgtggccaatgttttaccaaagcttacgcctttttttgaaagagaaaccctcgtatagactatacgagggtttttcttatttcttcaattgctcataaacacgtttggcattttgaaggccgatccgataatcgagacgaatcaggcgaatcgcttccatctctggttctttgaggtacttctctttttgttccttagaaatactacctggtttaagaagatagtgagtgaattgatttctgactttattgagctcaacttgaagagtgaaataaagtccaaataagacaatgacaactcccatcatgatcagatcgtttgacatggtgtatgctccctttttctattcttttctttattttacagctttcaaagaagaaaaacaagaggctgggacaaaagtcctagcctcttgtttttggattgtcgagcaagacgcagtggttgagtgggctctactacgctgttttcatcagcttttacagccctactcaactgtgcggaggtgggacgacgaaatcgaattctaacgaattaccgatttctgtcccactctccttgtttgtccttatttcatcataccagcctggagatcatacattttcttatacgttcctcctagagcaatgagttgatcgtgattgcccgattcgatgatttttcctttatcgagaacatagatgcaatcggcatcttggatggtagaaagacgatgggcaatggcaatggttgtccgcccttggcgcatcttcttcagagaattttggatcatctcttccgtctcttggtcgatattggcagttgcctcatccaaaatgaggatcttaggctgggcagcaatcgttcgagcaaaagccagaagctgacgctgaccggtcgataaggtagacccccgctctgttaccggatgatcatagccaccaggtagactctcaataaagtctgctacatccacaaatgcggctgcttgtcggatttcctcatcagtcagttcttcatggtacatccggatattagaagcaatggttccatgatagaggaaaggctcttgcaacactagaccaatggacttgcgcaaggctttctggctgtagtccttgatatcctgtccatcaatcaagatccggccacgatcaaattcataaaagcgcatgaagagattaataatagaggatttaccagaaccagtatgaccaacaaaagcgatggtttgtccgtttttgacctcaaaggagatctcttttaggacatcccgtttgccatcataagaaaaagatacatcctcaaaacgaatatccccccgctcaatttctttcaggctaccagcttgcttgggctcatagtcgtctcgatccatcatttcaaagacacgacctgcagaaatggttgaggtctgcaaggtagcaaagttctgcgtaacatcaatcaagggttggaaaagctggctaacatactggataaaggcatagataagaccggctgtaaagccagagttacgccaatttaggccgaaaaaggttagaataaccgcataagccaggacctgtaacagggtcatagctggcctcaaaaagagggaattgacatctacagatcggttggcatagtccaaatgttccccattaatctgttcgaattcatccgtcaagcgcttttcttgacgaaaggcctgcacgatccgcattccttcaatggattccgataatttcacattgatatctgataatttttgtcgggtcatcttgaccaagcgattggataacttgcgatagagacggatggaaaaccaaatgatgggaagaaaaggcaggatccaaatagtcaaatgccagtccaagctaaacatggttaccagggtgactagaaaaagtaaaaaggatgaaaccaggcttgaaaagaccgtagaaaacatatctgcgactgcctgggtatcattggtcacacgcgaaacaatcgaacctgctgctgtctggtcataaaaggacatgcccagcctttgaagatttttgaaaatatctagacgaatgtctcttacgatagaattggatacgcgcgcaaaggttaactggctcaggtaagtcgccagcacgcgaccaatgaataacccatagtagagaatcaaaaactgaaaagttgtcagtactggggagcctgcttctgttggatccactaggtggtcaatgtaccagcgagctgcaagagggatcgccgtcaataacagactagtcaggaaggtaaaggctaaggctagggctgttaaccacttataacgccacatgtaagtcaagagccgcttcatcacacgagcttcagatgttttcattcagctttccctccatttcttctgataattgttgggcttggtaggtttcatagtaccaacctttttgagccattaattcctcgtgatttcctcgctccttgatctgtccattctccattaccagaatcaaatccgcatgaacgatcgctgataggcgatgggctgtgatgatggttgttttccccttgcgttcctgcttcatattttcaatgatttggtgttctgtcttagcatctactgcagataaggagtcatccaagatcaagatctcaggattcatgaccaaagcacgactcatggcaatccgttgcttttgcccgccagaaagagagactcctctctctcccagcactgtctccatctggtctggcatggccagaatatcctcatagactccacaagttctcagagccttcatcacctcttcttcctcgatctgtggatctgaaaaagcgacattctctcgaatggtcatggcaaagaggatctgatcttgagggacgtagccgatcaagcttcgaagatcttctaaacgataatgtttgatggagatcccatttagcaagatatctccctgctccaagtcgtgctctctaagcaagagacgcaacaaggtagtctttccagatccagttggacccacaattccaagggtttgccctttttcaaaatgaaagacaaccttttcaaggacaggatcattctcataggcgaattcttcaatatcatattccagatctccgttttgaatgtctgtgactggttgacttggatcttggatatcaggtatttctgctaaaagtgtctcaatccgatcataggaaacactagcacgctgactaatattaaacaagaagcccatggcttgaaggggccagacgagcatattgagataggtaataaaggttacgatttgtccaaccgtcaggctcccttcctgaacaaatagccctccgaagtagagcgtcaaaacataggagagaccgacaaaaagaagagtagtcggatcaaacaaagcattgtaaccggctgaagtcatattctttgaaaagaccatttgattggttttttcaaaagcccgaatctcatctgcctgaaaaccaaaagatttggtcaccttgactcctgatacggattcctgaacaaagttgttcagctctgagaagccttcttgggcctctttgaaggctttgtggtttttgcggccaatagctgaagtcactaccaccataaccggtagaggcaaaatagctaagagggttaagcgccaatcaatcatgaaaaacatgctgaccagggtcaccaaggctgtcacggaagcatccactgcagacataaccccgccaccggcaaacatggttaccgcattgatatcattagtagcatgggccatgagatcccctgtgcgataacgctgatagaaagatggagacatgagcgtaaattgcttaaacaaacggtaacgcaagatccgagccaacttattagccgtcccaaaaatatagcgtctccagacaaaacgaaggccatacatggctagagctgcgagaaccaaaagagcgatatccacaactaactgccccagtgtcagccttcttttatcgatcaaatcgatcacaagtcccatgattcttggaggaatgaggtttaaaaaactaaccaagatcaaggaccctatcccgatcaagtatcgcttcttctctaaattaaaaaaccaagataatttcctcaacagattcatcttatttcccctttttggtgagttgccagctactatccaccagagcaaacaagtcctcatcagcaattgttccatctaaggggatactcacccaatattttttattcatatgaaaagctggataaatccctttctgctggatgaaatgggctacttgatcagacttaacattcaaaacttctattttcccagacttgccagcatccagttttttccaatcaatggtcataaagacaccataccacttgagggtgtctcggtggcgaatagcgccggattccggagatctttcccacaaatactcaatcgttccctgatagtgcagggagatataggccatgagacgcttggcttgaggatagagaaattcttctacctcaaaacaagcttggcggatccttgcaagactttcctgacaagcttctctgacttggccaacgaaatttccttgtagctgttccagatggatctggatatactcgtcccctgtatcctgatcatagacctgaaaagaaatcttccggtcgcagacctggacatttaagagaaaagtgtccgataagacgggacactggtacgcatagcctgcccctttcttctcaaatccgtaagccaatcccttttctggctgaaaggtgtaccggtcaaaataatgctctaaaaacatttcctctcccttattcatttttacactagaagaggctggaaacaacgtccccaaccttgataacggatcttcaaaactacttcaagcagtgatcgtttcttttttaaaacacaatgcgcgtgccatgcagttgacaaacgcccaattgctccaaaaagagctgacgattgtcaagggtcacacctccacctggcaggatctgaatctttcccttagccgcatctaataaacgatgatagtgggcaaaacgttgctctagtgggtcacctggacttccggctcgtgttaaaatgcgggctacaccctgatcagaaagccactcaatcgcttctagctgatctgtatgagctaactcatcaaaggccatatgaaagacaacctctgcctctccacaggctgctagtaaaagctgcatgatcctctggtccaactttcgatcgctcgtcagcgctcccagcacaaaacaagtaacccctatttctttcgcagcacgaatatccgtcagcatagcttcgacttccagatcagtatagacaaaatcgccacctcggggtcggataatgacacatagatccacggacttctctcttgtcagtttgattgcttcattgatcacacctatactaggtgtggtccctcctactgccaggttatcgcacagttcaatgcgacctgccccagcagcaatcgccttatcaatataagttaaattctctgcacaaaattcaaagacaagcatgacaactccaattacaaagacttaaaacaaggatatactaacagttaccttagcattgccattttccactctcgcttttgagatgctatagcctgcttgagggatatcaagggtgatttgatcaccattcactgtgaagccgcctccattttgattggattgatccttcaaatagttgagaaccaagaattttggaatgggcattttccctaatttagcaccggtcacggtcaaattcatgacattgttttcaacttgaccggtcatggttaaatctagatagctatcgattggccctaatgatacaggaactttgacatgaaggtcattgccatccattcctaatgccatcttttgatagtcagaattgtcaagggcggatccagcacttgtttttacgacctgactcaattgcactgaattgagacttagctcagttgagagcccttcagtgctcacagaggcatttgaaacagcattttgagccaactcaatcaaagaactccctgcctgcacatttctcagttgctccccttcagggatagagccaggaaccaacaagatcactaataacataaataaaacgatcaccatgccaattaggcgtctcatccacttaaacatctgctcctccaatacgtgaaaagttgtattcttattgtaccctaaatctaaagaaattgcgactaagaggggcctttagaaagcaaaagagagcgtgggacagaaatcggtaattcgttagaattcgatttcgtcgtcccacctccgcacagttgagtagggctgtaaaagctgatgaaatcagcgtagtagagcccactcaaccactgcgtcttactcgacaatccaaaaacaattgagaggctaggacttttgtcccaacctctctctgtgcattatttcgatttaatgtagttaacaccatctgcttttggtgcaactgcttgtccaaagaaggctgccaagacaaccatggtcaagacgtaaggcgcaatttgcaagtagatagatgggatacctttaagcaaaggcaattgattcccgataacagccaaactttgtgaagctccaaagaagagactagcaagcatggccccgattggattccatttcccgaaaatcatagccgcgagagcgataaatccaggacctacaatagtagttactgcgaagttaacagaaactgactgagcgtaaatggctcctccgattcctgctagggcaccagagatcatcactcctaagtagcgcattctatatacattgattcccaatgtatctgctgcttgtgggtgttcaccaactgaacgaagacgcaatccaaatttcgtcttgaacatgataaaccaagcaaagaatgaaaagagaatcgcaacccagccgatgacgctggcattgttgaagaaaatatccccaatgaccggaattttagataagaccggaatcgatgttttcccaaaggcaactttgatattatcagtttgtcccttgttatacatcgctttaacaaggaagaccgcaagtggtggtgccatcaagttcaatactgtacctgagacgatatggtcagcacggaaatgaatggttgccaccgcgtgaatcaaggagaagagtactccaatccctgcagcaacgatcaaggacaaccatggtgtcaaacttcctaactcaggctcaaaagtcaagttaaagataatacctgagaaggctcccataaccatgattccttccagaccaacgttaacaaccccagcgtgttctgagtatgctcctccgatacttgtgaagatcagcggcgctgcatacacaatcatagaggaaacaagaatacttaaaatcgttacaatactcattagtttgctcctccttttttagctgaacgcatcgagatcatcttttcaataatgtagtgagcacatacgaagaagataatagatgctgtcacaatttgaacgacttcttcagggatggcagctggcttcataccaactcccccaatttgaagtgctccaaacaagaaggcagcaaatggaataccaattggtgaattcatcgcaagaagggcaacggccattccgttaaatccaacactcattgagctggtttgaacgtagacatttgagtaaatacctagaccttctgctaccccaccgataccagcaagagcaccagaaatgatcatagaaaggataatggtccgttttgcagacatccctgcgtattctgccgcattcgcattgagaccaacggcacggatttcaaacccaagtgtagttttcttcatcaagaaccagatgaccaccaatgcgatgatggcaaagaagattccgatgttcatttgtgatttgtccgtcaaattacgcaaccactccgtctggtagacagcgttggctcccacatcaatggttgagtccttgttttccatcaaggaagctgggaagctatgaatcaaggcattcccaccatagagaacaatgtagttcatcataatggtgatgatgacctcactggttccgagataggcacgaaggaaaccaggaatcgctccaataaatccacctgcgacagccgcaatcaaaacggtcatcggaatcattagtaaacgaggcatatttgggaaggaaagggcaaaccaagtcgccatgatccatcctgcaaaagcctgaccaggaagtccaacgttaaagaagccggcccggctagctactgaaaatccaagagcaactaaaatcagtggccccatggcacgggaaatatttccccaactcttaatcgaaccaaaggctttcttaaacagcaactcatatccccaaagggcatcatagctgaaggcccacataataatggcacccaagaccaatcctaaaaggacagacaccaatggaacggcaatttgttttaaattcttattcatttgatgctccctcctttacttttcctcctgccatgaggattccaagttcttgcttattcgttgtttcaggggttacgatcccttggatcttcccatcatgaataaccgcaatacggtcagaaacattcaaaatttcatctaattcaaagctgacaaccagaacggctttcccattatcccgttcttgaatcaaacgtttgtggatatattcaatcgctccaacgtccaatccacgagttggctggctgacgatcaagagatctggatcgcgatcgatttcgcgagcgataatggctttttgctgatttcctccagagagagccttagcaggtaccacttcactggctgcacgaacgtcaaactcttccatgagcttcttggcataagaggtaatatttggataattcaaaataccattcttgctaagaggttctttataataggtttgaagtgcaatgttttcagagatcatcatatcaaggaccaaaccatcccggtgacggtcttcagggacgtgccctaccttcatttctgtgatttgacgtggacgaagtcctacaacgtccttgcctttaatcttgattgaaccagattttaccttccgtagacctgtaatcgcttggatcaactcagattgaccatttccatcaatccctgcaatcccaacgacttcaccagcacgaagttccagtgacaaattcttaacagctgggactccccggttttcgtttacaaccaagttttcgattgacaagacgacttctttcggttgagaaggacctttctccgttttaaaggaaacagaacgaccgaccatcatttcggccaagtcttggttggtagctccaccaatctcgactgtctcaatcgatttaccacgacggataactgtgacgcggtctgaaacagcacggatttcatccaacttgtgcgtaatcaagatgatggattttccttcattcgccaagttcttcatgattgtcatcaattcttcgatttcagctggtgtcaacaccgcagttggttcatcgaagattaggatgtcggctccacgataaagcgtctttaggatttccacacgttgctgcgcaccaacggaaatatcctcaactttagcatttggatccactgccaagccatattttttagacaagtcaaggatatcttgactggctttcttaagatccaaaacaccatgtttagtggtttcagaaccaaggataatattttcagcaacggtgaaggcttcaaccaacataaagtgttggtgcaccattccaattcctaaagaagctgcttttgaaggtgagtctaggttaacagtttttccatttaccacgatgtctccgctagttggttccaacaaaccagccaacatattcatcagggtagatttccctgcaccattttctccaagaagtgcatggatttcacctttgcgcaactgaagattaatcttgtcatttgctacaaagtcaccaaattttttggtaatctcacgcatttcgatgacatattcatgtgtcatggggtgtttcctttcaaaatttttttatttcaataaaatctgctaggtgactaacagattttattgagacaaaaatgtctcactttaaaagaaacggcccttaaagggagggccgctccaatcaaatattatttttcaggaactttaagagacccatcaaggattttagctttggcatcttcgacagcttttttagcatctgcagaaaggttgtcggttgtcaaatcaactccaccatctttcaagctataagtaatcactttaccgccagggaatttaccgtcagcagctttcttcgctaagtcttttacagattctccgactttcttcaagcttgaagccaatacgaagttagattttttgccatctttagaagtatattcaccttcagctttttggtcacggtcaacaccaagaacccaaactttttcgtcttcatttttcttttcgttcaagtctttggcttcagagaagacacctgcaccagtaccaccagctacttggtagataacgtctgcacctgcagcgtattgtgcagcggcaattgttttacctttagcagagtcaccgaatgaaccagcgtagtctacttgaactttgatagatgggtcaacagatttaacaccagcttcaaatccagcgcggaaacgagtgataacttcactttccataccacctacaaaaccaacttgtttagtttttgtagtttttgcagcagcgataccagcaaggtaaccagcttcgttatcggcataaacagcagatgctacgttcttttgtccttcaatacggtcatcgatgatgacatagttcacatcttcgttgtcttttgcagcttttttaatagagtcgctcaaggcaaaaccaacaccaaagatcaatttgtagtcgttagaaacagcttcatcaaggtttgtcgcatattgagattgatctgttgattggaagtagtcaaatccgttccctttagaaagaccgttttctttaccccaagcttgcaaaccttcccaagcagattggttgaatgatttgtcatccacaccaccagtatcggtaacgatagcaactttcaaatctgttttagattctgagttagcgctatcttttttagatgcacgatttccacatgctgcaagtccaatagcagcgacagttactagaccaaggcctagccattgtttcttgttcattactgaacctcctaaattattgtgcaacattgttgcgaagtattgaaagggtcaaaagaccgccccacagacccattaagtcaggtctgtaaaggaatatggaagtaattccttgaccgtcatcacgaccgtcgatttatctttagataccaaggttacaggaaggtctggctcaaaaaattcagccatgacctggcgacaagcaccacatggagagatgggtttttctgtttgcccgtagacaatgagctctttgaaatcacgagctccttcagaaacagctttaaaaatggctgtccgttctccacagttggttaatccaaaactggcattttcgatattgacacctgtatagatctggtcatccttggtcacaaggactgcactaactgggaaatgagaatagggcacataagcctgctggctcacttctactgctaaattgatcaactcagtagtcgccatgagccacttttccttccatgattgctacaccagaggaagttccgatacgggtcgcaccagcttcgataaatgcaagagcatcttcataagagcgagctccaccagaagctttaacacccatgtctggtccaactgtttgacgcattaaggctacatcttctaccgtcgctcctccagttgagaaaccagttgaagtcttcacaaagtcagctccagctgacttagcaatctgacaagcaacgatcttttcatcgtctgttaagagacacgtctcaatgatgactttgaccagcttatcaccgcttgcttcgacaacagcttggatatcttcttcaactagtgctaaattcttagacttcaaagcaccgatattaatgaccatgtcaatttcatcggcaccattttgaatagcattttttgtttcacacgctttgacaaaaggggtatttgctcccaaaggaaaaccaatgacggtacaaacttttacatctgaatcgcgcaagccctcagctgcaaaattcacccatgtcggattcacacagacactcgcaaaatcatatgccttagcttcttcgatcaatttttcgatctgttcttgttgcgcatctggttttaaaagagtgtgatcgatatatttatttaacttcatacaatctcctgagctacttaagatattatttcaataatttctttaacgctttcagccccttctagtattttaacattttttttgaattctgtaacgccttcttgtgaatttttttcattcatgaaaatgcgggcaatgcgttccccttttttgacgtgctctcccacttttttgtcaaacacaatccctgtttcgtaatcgaggggatccgatttgacagcacgaccagcacccaggcgcatagcaaacaaaccaaactccatggcaggtaaagcagcaatgacgccatcttgatccgctgttacttcaaggacctgagacactttgacgggacgatgcaaatcttctaagtctccaccttgagccaccaccatttcttcaaacttcgctaaagcctgaccattgttcaagtgttcatggatcgcttcaattgattgatctacattggccaatttcaacatgatttgcgctaactcacaaataaactccgtcacatcagctcgcccttgtcctttcagaatatccagggcttccaaaatctctaaacgattgccaatgctagttcccaaaggttggctcatatctgtaatgacagcgatggttttccgacccactgcatttccaagatcaaccatggtacgtgctaagcgacgagcatcctcaatattcttcataaaggcaccctcgcccactgtcacgtccaaaagaatggcatccgcaccagcagcaattttcttactcatgacggagctagcaatcaaaggaatggtgtccactgtcgctgtcacatcacgcagagcatacaagagtttgtctgcttttacgagttggtcggattgaccaatgaccgataatccaatctcctgcacctgctggataaattcttcttgggttcgttcaatctggaagcctttaatggattccaacttatcgatggtcccacctgtgtgtcctaagccacgaccgctcattttggcaaccggcactccgaaacttgcaaccaaaggcaccaagaccaaggttaccttgtctcccacaccaccagtcgaatgtttgtccaccttgatccctggaattgctgacagatcaaactgttgccccgtttggaccatcttcatggtcatatgagaaatttcttccgtcgtcatccctttaaaataaacggccatagcaaaagcggacatttggtaatctggaaccgttccagccacatagccctcaatcagccattcaatttcttccttgtttaaggcaagaccatctctttttttctgaatgatatctactgctctcatgattctttctcacttcttaaaatataatagcctttgtctttttttacggtctcacaattgccaaacgtctcttccatcttggccttagcgctcggagctccttgttttttctgaatgacaatggtcaaatctccacctggtttcaaatgttcaaaactaccagtgatcacttggtgaaccactttcttaccagctcggatcggcggattactgatcacatggtcaaaaaacccttctactgcttcatagacatccgaagaaaagatctgagcttccacgccatttcggctggcatttttcttagccaagtccagtgcccgctcattgacatcgaccatggtcactgcaactccctgggctttagcgagagagaggccgattggtccatagccacagccaacatcaaggacactttctccttcttgaaaatccagggttgataagagcacctgacttccatagtcaatcatttttttactaaagacgccggcgtccgtatagaaattcatcttttgccccaataaaacaacagccagatcatgaatatcatgggctgcatctgggtttacatcgaaatacattttactcataaggttattttatcataattcactccttttttaaatcgtttacatgacctctaaaaattggtatactaaagactacaataggagtgacatatggacaaagaatttctacattttgaaaaaattaatcgggaaacgtggcaaaatttgcaccgcaaaaccaccccacctctctctcaaacagagctcaattctattaaaagttttaacgaccgcatcaacctccaggatgtacgtgacgtctacctgcctttgacaaacctgattggaatctacaagcgttccaaagaagatttggctttctcaaaaggtatttttcttcaaaaaacgagtgaacgccaaccctttatcattggggtttcaggaagcgtagcggttggaaaatccaccactagccgtctccttcaaatcctgctgtcacgaacctttgaaggctcgacagtagaattggtgacaacagatggcttcctctatccaaatgctatcttaaaagaacaagagatcctcaatcgaaaaggatttccagaaagctatgatatggaattgctccttgattttcttaatcaaatcaaaaacaacaagagcgtagaaatccctgtctattcccacgaaatatacgatattgttccagatgagaagcaaaccattttaccagctgattttgtcattgtagaagggatcaatgtctttcaaaatccgcaaaatgacagtctctatatgaccgatttctttgatttttcgatctatgtggatgccgcggtcaacgatatcgaatcttggtatatcgatcgcttccaaaaactccttgcattagctcagaatgatcccaataactactactatcgatttacagagcaacccctagaagaagttttaagcatggcccatcaggtctgggaatccattaatttagtcaacttgcaacattacatccaaccaaccagaaatcgagctgatctgattctccataaggcaaccaaccatgaaattgacgaaatttatctcaaacgctagagaaaatggcctgttaacggtacttttttaaggaaaagctattttaggcttgtcaaatcttaacttttcatatataatgagatagttagattatcaatggaggtgaataacttggcaaacattaaatcagctatcaaacgcgctgaattgaacgttaaacaaaacgaaaaaaactcagctcaaaaatcagctatgcgtactgcaatcaaagcttttgaagcaaacccatctgaagaactttaccgcgctgctagctcagctatcgataaagcagaaactaaaggtttgatccacaagaacaaagctagccgtgataaagcacgtcttgcagcgaaacttggttaatcaagaacagcataaaaatcaagctctccggagctttttttgttcctaaatttttgagaggtgcttatgaaaattgttattatcggctattctggatctggaaaatctaccttggctggagccttatctcgctactactccatccccaagctccacatggacacccttcaatttcaaccgggttggatagacagtgatcgggattggatggagaaagagatgagacagtttctcagcgatcatagagactgggtcattgatggcaattactcttggtgctgctatgaggagagaatggagcaagccgaccagatcatctttctcaacttctctcgttggaactgcctctatagagggtggaaacgataccgccgttataaaggtcgggtccgtgagagtatggcagcaggctgccctgaacgctttgactgggaatttatccgttggattctttgggatggacgccaagccagacaggtcacacgctatcggactatcggccaaacctatccagacaaatttatctctcttaaaaaccaaaaagaactggatacttttctaaaaaacatataataaaaaggttgggatataaatcccaaccttttttatttatcaacgtaatcgccaccggtgaagccatagtattcttctagactcaaacctgagtcagcgatatcttgtgcttcttttccgatatagcggagatgccagctttctggcatgtagcctgttactttttcttttccttcttggtaacgaaccacaaagccatatttagcagcattcttgagcaaccacttacttggtccaggttcggttaccaaattaccactggtatcgattaaatcaaaggtcaaaccagtttggtgttcactataacccggtcttgcagaataacgatcggcggcttcctgaccatcttgattgacatagttttggtagaggccaacttgggtatcgtagctacgaaaaccactatattggtcactgatcggatatccttctgcctgcatggctgcgatcaattcatgaagggctgaaacagcttcaggatcttcacctgggttaaagtcaggcgacaagggataatgtttgttggcgatcataacctcaccatatttccctttgacactatagtaagaaccattatagctgacaccagagtccactttgacatctgacttaccagcttttgaagactcttctttgccagtctcttttgatgtatcctttgcagaagacgtttctttggaagacttggtttgcgtttgtttgctttcttcttttgcagaagacttagaactagtggaatgagattgggagcaagctgtcagggttaacaaggcaactgtcaccaaagttaatttggaaaatcttgctttcatgggaatctcctatgattcttttgttacgacaatatctgtaatcacataacttgcacctacttttttcaaggtgtaggtcttgtacttgcggttttgtgaatctggatggctatctgtataatgcacggtaaagtcttcataagtcttgatcgttaccacaccattttcttcagtgacactttgaatgtccaaagcacctggagtatagtagtcaatcttagcctttcgaacaccatcaccagttgtgaactcaaccatgtctttgtaggcttgactttgtgtgtcatagtatttagagtaggtgttatttcgatttgaaacggagctaaagacagcgtcgcggtactctttcaagaattcttccgccaaggtccgattttgttcttctttggctgcttgcgctttcttagcatcttgtgcactcttgatgcgttttagggtatctttggctagtttgagttcgatcggatcgttctcaccctcttcaatcgtcaccttagccttttcagttgtataggtttccccattcatgttgaagacggcatgtacttcaatttcttgataagggatgctatctacttcaaaggttgtgctggttccgacttctttgccgttaaccacaacctttacatctgttgggttttcaacttcatctgggaactcaacttctaaattgcgtttttcagaattcaactgcaattctaaattattcttggttgcttttttaggattgagatggatcttagaagtgacatttccgacctctgttttagcagtcaattccatttcttttgtattgtaatggaaagaaccaaggtctgtcactgcatctttcttcaaggtcacggttttattggcagccactttgagtttggcttggtccaaattggtcttgaccttcacttgcactggatagctagccacacgatattcttggaagattccaaatttcttgtccgccttttccaaaccaaagatcttgtttccagatttatccgtatagctgccttctccaccattatcgatgatcttgttcaactctgtaccgatatcaatcccttgatcttccatgctggtaataaagctttcggcttcatcctttgtccatttatcgttatcggttgaaagcagatctgctgcttcgcgataatccttggtgtccactgccttaataaatttatctgcagtcacttcgacacgcgttgttgactggaagtaaaagaaggctgctaccaaagcgatcacaaggactgcaatagcagaaataatcccaattttcttcttggaaagtttcttttcacccttcgttttaggggccttttgttttttctgagctgggcctgcttctgtaacatttggaccagcaaagacctgcgtttgctcagcggcaagtggagccgtatactcttgagtttgctgttgagggacatattcctgtgtttcttcagttgcatctggggttacaaattctgcttcaggcacaggtcctacaaaaaactcaaagttttgacttttagccgcggtaaattcttctgcacttggctttcgcccataggtttcttcaaaatgttgcaaccaagcctgacgagctgctagaagtggatcgacattcttcacttcttcaactggttcaaccactggttcctcaacaggagcgtcttcctctgctggggcatttcctgcgatagactgaatttgtttcaaatcaaatccacaagctttcccagccataaactcttctggtgacggtttgcgaccgatcactttttcaaataattcaacccatttcttttgcatggatctcttctccctcattataaaatagggaaagtgggttcccccaccttccgttttgtgatattgttagaatccaaagttagagaaatttggagcacttggaataaatcctacggctacttgttctaaaatacgagcattcacataaatgacaaaaatggcaatgagaagcaagacaacagatgatgctactagaagcaagaatttatctgttttaaagcttgtcttgttcaatccttgatgaacgacatagcatgttccaacaaagaacaagaagaaaataaggaagtttacaaagccataaaattcataaacttttacaagacctactaagaaagcaaggagggcaagtggcaatgtgtaaacagacaaacgtccaaactcttcaaatgaacgaccgtaactgtattccttatcttgaagaaccacacgacgaacaaagaatccagctacttggaaggcgtaaaggctaaagaatagggaaatcaatgtcaacataaaggcacggaaatccattccataaccgcctgtaaatccactagctgtgaagaaagttgatagggtcaagacaaaggcagttaagacatactgtaaaattccgttaagagcttttggattttctacagctgttggacgtttcaaagctgaaaggaaccaattccagtaaccaccaacggctacaccaaattgacttggttgggcaggataaggttgtcctggttgaccttggtaaggagctttttgataagctgcttgagtcggttgttggtaggcttgttgtggagcttgttggaaagcaggtccattcgttggagcagcctgaggagccggttcttgaactggagctacaactggttcttctgcaggagcagctggcgctgcgacaaactctggagcttgtggagctgcgactggttcttcaacaggggcagttggtgctgcgacaaactctggggcttgtggcgctgcgactggttcttcaacaggggcagttggcgctgcaacaaactctggagcttgtggagcagcaactggttcttccacaggtgcagttggtgctgcgacaaattctggggcttgtggggtttctggaaccactacttcttcttgaaattctcctgcagccagtgcttgagcaatttcttctgcactagcagaacgaccatttacggcttcgaaataatccagccaatcttgttttgacatatttaatctccttaactattgtttatactagggtattatacaaaatttctgaaccattttcaatgaaagactggaaaatccctgtaatatcttttgaaaaacatacaaattctactcatttttagaaattagtaaagaaaacgacctcttttcagaggtcgtagaatgtagacaaactattttaaagtaaaataagttaagctattcttcaaagaaataaaaatgaattccaatttttaaatcgattcaaaaaaataccaaaactttccgccgtgagaaaagtgcctgaaacaataacgtttcaggcacccggaattattgagaccttaggctcaataataagtcttggaacttcgtagaagttcgctgacgtccgtactcacctaaggaaaatttttaatatgactttatcttcaatttgagacctctattcagaggtcatttcttaagattcaaatgcatccatgccaccttggacgttggtcacatcatagccttgctcttccaaaaattggcaagcacgtgctgagcgtctccctgacttgcagatgacataatagggatgatccttctctaattcctggtagcaatttgctaactcagataagggaagaagacgaaccccatctaagtgaagggcatcatattcctcctgctcgcgtacatcaagaacgtgtatgtttcctttttgataagcttggtaaaagcttgaaaatggaatttctttcatgatttctcctttgttatggaagggttagaatttcataatgaaagccaatagcctctaaaaatctgaacaagtcttgggttttaataaagatcgttttttcgttggtattgggatgaaaggtcatgatctcctctgacacaatgtctttatcgaaatagacacgaatatctttttcttcattgttcaataaaccaaatggagaaaccgtacctggcggtaattgcattttttcagctaaagaatctgctgaagccatgcggatccggttggcttccacttgctctttgaaatcatccatatccaatggcttctggtcatccatgatgagcaaatagtattgagttttctttttgttggtcaaaaacatggtcttagtgcggacaccttctaagccttcaatataataatccgcctgctccgtcgtaaatgcaggtgggtgttccaccacatcaaatgaaattcccaactcatctaatttttctttaacttgttgataaggatccatcttcgctctcctttatttttgaatgatctcttgtactaaggtttgcaattctgggactacttctgcctcaaaccaaggatttttagccatccagatttgattgcgaggggaagggtgaacaagtggaaaataggttggcaaataatctttaaaatggtgaacccgttcggttaccttgccactaaccttttcatgaaggtagtatgcttgggcatattgtccaattaagagggttaactcaatatccggacactccttgagaagttgagggtgccacttttccgcaaagcctttgcgaggtggaaggtcaccagattttccatgccctgggaaataaaagtccataggaatgaccgcaaacaaaccagaattataaaaggtgtcttcgtcaactcctaaccattcgcgcaggcggtcaccactcttatccttccagtaaataccagcttcttgcgttttcagtccaggtgcctgtccgataatattgatgcgagcagtttttggtgctgcaaagagtggctcgattcctttatccgtatatgctttattttgaggatctgccataatggcttgtttaatgctttcaatcgttgacataagtcctccttctatggaaaaactcagccagaaaaactggccgagtagtggattatttgattagttcatagatagcttctgcgtaaatagcagctgcacgatatagatcttcgacatctgcaaactcattcgcttggtgcatggtattgacatagtcagggaacatagcaccaaaggcaaccccacgtttcaagagacgaccaaaggtaccaccaccgatcacttgttcgtgtcctttgaggccagtttgtttttcataaacacgcaagagagtggataccaattcgtcatccatcggaacatagtgaggagtgtgaccatgagcggacaagcttactgtagccactccttcgatcttttcaagaatggctttgatagtttcaggatctgtaccttgagggtaacggatattgagggcaatggtgttgtctgcttggctttcatcaaaatggaagacccctgcattcatgctcaatggtcccattttagcatcggtataggcaatacctaatttttcaccagcaaaatcttcgtgaagaagtgaagctgtcacatgaagataagccttagcagcaccaccaaaatcaaattggttcaacaagagagccaagtaggtcgcaccattgatcccatcttcaggagttgatccatgagcagatttcccaacaatcgtcacggtataggtttcttcatcgacagttgagatttcatacttgagctggtgttccttggcaaaggcatctaagaggccagcaagatctggaagttgaccagaaacgactgcagtcgctgactctggtaccatgttttcacgaaggccacctgtaaagctatgaagatgggcacttcctgtgttgtcatttccaaaatgaaggtactcagtgatgtttcctttttccccattgatgattgggaattccgcatctggtgagaagccaaaatctggctcaggaagtccgacatgtttgaaataataatccatgtcgccccagcctgattcttcatccgtaccgacaacaaagcgcacgcgcttagaaacagggagtcctaggtctttaatgatcttcaaaccatagtagcaggccattgtaggccctttatcatcagacgaaccacgcgcatagagcttaccatcgataatttctggtttgtagggatccgttttccagccactacctgctggcacgacgtccatatgggcaaagatcccaagctcttcttctccttcaccaaaaataaagtgaccggcataattgtcgacattcttggtttcatagccatcacgtttggcaatttccaagaatttttcaagagcttttacaggaccaggtccaaaaggatgctctgcatctgccttgctgtcatcgcgttcagaattgatttccaagaggctgtataggtcagccatcatctcatcgcgacgtttttctacttctgctttaaagtcaactgttgtcatgaattcctcctcgatcttctatttgctaattggcttagcgtttgtcaatgatttcgtccactggtaagcgatagcttggctctactttttcagccgcatagccaaccgtaatcaagacttccggacggaagcgctcttcgatgtccaatacttcattgatttttgatttatcaaattccaagataatattggttccaatgccttggtccgtcaaagcaagtaccaagttcatcgccacaagaccggcattcaaagccaagtaatcacttgtttgttggacatcatagcgcgcaaattcagcaggaagattttgcataaagtattgcaattgctcatctgtgaagtttttaactccaccgacacgcgcaatcttgcgagcccgtttttgcaaatcagtatctgtaaagagggcgatggtcacaggtgcttccatgacttgatcgtagtttgcaccataggctaattttgccaattcagcatttttttgacgaacgaccacaaatttccaaggctggctattgtgggcactaggggccaaggttgcgatctcaatagcggtccgtacatcctttggatcgaccggttggtcagtgaaatgcttgatcgcatggcgttttttattgagctctagaaatttcataagcttcttccttttctatttctgttacctctattttaacacaaaatgaaagagcttgcagggttttacagcctaagattgtgaaaaaagaagcggacattttgaagatccgcttctttgttataggttgaatacacaagagatccacctatgattcattggaaagattgaaataggcagctacttctttggcataaccgtatttctcaattaagccagttagcagatcgatgttatgaccccgatagttatcctcgcgtctcaattcttcgtacatctcaataaaaggaagacctttgtccttagcatcttggagctctgcttcatagtcataggccaccttacgaaattgcaggttggtcactccatcttcttcgacatcgatcagagcatattgagctctgtggttttgaattggtccccagtcgaaataaggcatgccaatagtccctggattaaggatctgctggccctgactgccatagcgaagcaactgcttgtggacatgcccgtagatcgccatatccgtctgatcatccagcagttggtcaaagttctccgtcacatttgctggacgcaagaatccaccgtaattcttttctggcaagttgtgggtcagtgaaaaacgaatgccattgacctccttcttctctaccaatggaagcgaacgaagccaatcgatccgcttaggatctagtccttccatgaggtactgagtgaggcgaagaagttggatctcctgcggatcctcaagtccgtactcgccatccaaggcctctaggacacaatcgtcccaatttccacgaacagccgctgtaatcggaatcgcatctagcaactcaaaaaggtcctctcttccaggccccggaagcaaaatgtcccctaaaagccagtattccgtcgcgcctagagcacgcgcatccgcaatcactgccttaagggctgttgtatctccgtgaatatcagataatatagcgattctattgttcattataaactccttatgattggtatggttcagaatcctccgccacttccaccaagggacttgcttcttctttctttccttgatggagcttggcttgcactgcctccgcgactgcccgtgggatgccgactgtgatgatctcatctacagtagcttccttgatcttggtcagcgacttgaagtgcttcatcagcaactgctttcgttttggtcccaagccttcgatgccgtccagctgggaggagaaggaattcttggatcggagctggcggtggaaggtgatggcgaaacggtggacttcatcctgaattcgttggaggaggaaaaattcctgcgaggtccgagagagttcgatgacttggagaggatcgccgaaaagcaattcatgggtctggtgcttgtcattcttttgcaggcctgcgataggaatgtccagccccaactcgtcttggatgacttgcttagcgatattgacctggccctgacccccatcgatgacgatcagatctggtggcgtcaggccatcccgcatgacacgactgtagcgtctgcggatgacctcccgcatgctggcatagtcatctggcccaacgacagttttaatcttgtacttgcggtagtcctttttgcttggcttcccattaacaaagaccaccatggctgaaaccggactggtccccatgatgttggagttgtcaaaagattcaatgcgcacaggggttggaatttgcagaagttttccaaggttttcaatggcaccttgggtcttttccattgatttttcaaggagattgaacttctgctccagactgacacgcgcattcttgatggccagattgaccaactgcttcttctcccctcgctggggcttgaggaccttggtatccacaagggccttgaccgcttcctcatcgatatcctgagggatcaggatttcattggggatcaggtgagatttctcctggtaaaactgccccacataggtcaagaaatcctcgtctggatcattgtagtaagggaagagattgacgtcgcgctcgatcagcttgccctgacggacaaagaagacctgtacacacatccagcccttgtccacgtagtagccaaaaacatcccggttctgcaaatccttggccatgaccctctgtttggtccgcagggtcccgatggcctggatcagatcccggtactcggccgcccgctcaaattccatgttttgcgcagcggtattcatcttgagcttgagctcatcgataatcttgtcatcctgccctttgaggaaatcagagacctcctgggccatgcccttgaaataggcctcgtccttgtggcagactgtgtgagccatgcattgccctaaatggtagtaaaaacagaccttggaaggaggattggtacacttgcggaatgggaaaatccgatccaaaagtcgcttgatctcattggccgctcccacatccggatagggaccgaaatagagaccgccatcctttttgacctggcgcgtgatgatgaggcgcggatagcgctcattggtaatcttgatgaagggataggacttgtcgtccttgagcatgatattatacttgggcttgttctccttgatcaggttgatctcaagaagcaaggcctcaatattggactcagtgacgataaattcaaaatccacaatctcagataccagtgcttcggtcttggtatcgtgactccctctgaaataggaccgcacccgattgcgaagattcttggccttccccacatagatgatggtaccgttcttatctttgtgaatgtaacagcccggactcgtcggcaagagctcgagcttggatttaatcaagttattcatactctctattatagcaaaaaagagaggggttagcctctctctagtatgtttgtattattgttatccaccttcaccaagtaaaaaataattattaaaaggtatatcagatagtcatcctcaatcctttatcttcacttgccctttttcgtatgctgaataccaactgctatctggactgacatattcaggtaattccttttgtggctgatctcctgaaagagttaaaagtccatcatatatcatacaagaatacttctctgaatctcttgtaaattcttcattttcaggatcatatgagtaagtatgctctgaactaccttcctttatggtgatctgctctccgtctatttttatccatgatgttttatctagtgaggccgttttagttgattcattttttactgtcagataataaattccatcttttgatttcatctcatcaagggtagtcgtgataatccctaaaatcatcagtgcagggattatcaacagaaaccatttccattttttagatttatttttcatcagtaaccattactccatttaattttaaatttcgttattttcatgttcaaattttgcatttctactttctctattatagcaaaaaagagagatctaagacgatccccctttactagcaatcgataatctttatcctttgagatttgccatctggaagagcggaatcacataaggaacaatagacatcaggatagtgaatagcacgaagaaccagaaccagaaggacgcgagggcacgctggaaaactcccggttgaggtttattggcttgaatataagccttgatagttggccatttagtcgcaagaaccactatcatcacaatggaaccaatagctaaaacaccgatttggagccaattcgctagtccctcatccacatgataggctacataatgcaggccttgggaaatgacaaagttattgaaaatgtgatagaaaatagcccaccagatattgtattcaaaggcaatgtagccgaatcctagaccaatgatacctgcgaaaaagagctggtcaaaattagcatggaagaggccgaataaaatagccgtcatgacaatggcaaagattttgccataccgttccaagcctcgcaagccagccccacggaagaagaattcctctgtgataggaccaaaaaagccagcatacaagagcatagtccaagatcgctcaatcgtatctcctagatctggtgttggagaatgaaggccaatggtctcaaacatgcgctcaatcacttgtgtcatcacagatgaaaagacttgagaaaagccaagaaaggcgagaagaataaagaagactgaaagtgtcatcttacgtcccttatgcttaagatcatatttataaagggccttcttgcgataggcattaaaaagaaagagtccaatggaaatagagatgaggtagggaataccagcccaaacattcagggcgtttagtttctccgttacttgacttggatcttttctgagagagcctgctatggtcaatccaaggaggacttcccacaggacggttactaaggtcattaccaagagataaatagcaagtgtcccagaataccttcctatatcttttttagggtctaataatcggttgtattggttcatttcttcctcctagaaaatagataaaaacacgcacagactccttcgtataagacaaagaaaatcaaaaaggcatgcataaagtagtcttctggtaatgcaagaataatcgaatccacgcgcggatcaaagagccaagtattgtccccagcaaataagacttgatgaaagagagtaaagaattgatcaaagccaattataacagtcatcactgcaagcactactggtaaaaccatcatccaaaagaagagactacggtacagggccaggtagccatttttgacgactgtccgcataaactggataaaaccaggtagagtgaccaagaaaacgaccgtcaccaaatgaaacaggtacttgacggcctcaaaatggtgcaagccatttttggaagaggggaattgaggcatcttcaacacccattgaaaaggattggtcaagtagttcatcaagacattaaaattcttcatgatgactgaagccgaaaaaccagttcggctttgaatctccaaccaatggatctccatgggatagaggacccatgctaggccaatggtgagaaggattgtagctgacaagataaagaaaaattggttgattgattttaaacttttaagcatcaaaatcccactccgctaaactggaaacaacatgtgtcggtgcaattggtaaggttggcacttcttctggtttggtaaaaccagtcgtcaccaaaagggttggaatcccattgtcaatacctgcacgaatatctgttagataattatctcctaccataacgacttcttctctttcaagacccaagtgttcaatagccttatccatgatgatggcctttggttttccaatgatcacaggctcgacccgtgtcgcagcctctacaagcgcaatcaaggatcctgcacctggcatcaagccacgctctgttggaatgttcaggtccggattggtcccaataaagtgtgctcctttttgaatcgccaaggtcgcaatagcaaacttctcataatccacttgccaatccaggccaatcaccacataatcaggtgcttcttcatcgatgatatagccagcttcttcaatagcgtctttgagccccgcttctccgatcacatagacctttttgcccaaattttggtcattcatgtagtcaatggtcgcaagggtagctgtatagatagtcgaaactggggtttttatattgaaatgagtagccagcatatcccgaacagtctctggtgtgcgggttgtattgttggtcacaaagagatagggaatctcacgcgcctgcaattcatgaacaaaagcttctcctgcaggaattcgtgattttcctttgtaaatagtgccatccaaatcaatcaaatagcccttatagtgcatttattcttccttttctgtttccgtttcgtcatgtaacttctctgcatcgactcgtccaccagaaccatataagagcaaggctccagcatagaggacaaattgtaacaccaaacctgtaaaattaatcccttgacttcccgattgggtgaacaagaaggatgctaccatgaggatgacaatggtcaataacaagcctatcacggttgcctgatccacactgatttgataaaccgtgcgtttagtgctccgatttttcccgtcagacttagtttctggttgcaaattctcgacaaaatccgtcactaaggtcgcagcgaggctgactgttgtgctaaagagcacgccttgagacaagcggtgatagaaattggaccagaaggatcctgattggctagtaatcccaatcgagaagatcatgaccggtaaaagaaaggccaaggtgaaatggatccagacccgataccagcgtatatcttctcttaaaaagcgattaaaactctctaaattcaagcgatagcggaaaaatttataaatttcctctaccaggatgatgcccaaagcacaaagagtcaagagccaatctcccaacatgtacaaagggttcttttgacgcttggcataggccacaacccgtttttgatagctttcaagttcctgttttttattttttaatcttctactttccataattccaacccttttcttctacttcttcccactcaatttcagcttgggcattgatctgactatctgaagtaatttggtgctgagttttcaagccctcttgttcatattgagaggtgatgagacctcctgctagcacttctttgacatattttagatgaacttttttagggatatgatgggtcaagaagtctgctcccatcacctcaaaaacccagtccaagtacttgctattgttgacatgtccgttcatatccaagtcgtaaaaccgaactcggtattcttgttccacgccaccttctaattctttgaaacggggaccgcggagcatggtttttgaaaattcagagtcaaaggcatccgtgatttcactcataacaggatgaaccttgcgtgtatcacgatccatcaagacaaaggtcgcgaccatctcaatgatagtatttcctgcttcatccttgatattaaaggcccggtagcagaaaagtcgattgtgactcttggcataggtttcaatagtgattttctcatcaaaaacagggagacgctcaatcttcatattgtaatccgtgataatccagactagattgtaattctctagaatgtacatatcactcatgcccagctcaatcgattgcatgcctgatacctgcaaagacagcaagatcaattgcggaatttttataaatccattgacatcgctcatatcaaacggaattttcatgctgtattcaaatgtttttgccattttctactccaaaataaacttctctgctacagtgtctcctaaaaagagacctttcttggtcattcgtacaatgtccttgtcaggtaccaaaaggccctgctggatcaatttctcaaccactgatccatattgttggtcaaaattcacaccaaacttttcttcgaaacgtttcttggaaacgcctgttttcttacgcagtcccagaaacatctcttcttccatcatttcagtctgagtcagatgttcctcctggacacgcgcatttccctcttcgaccgcctgcatatagtgacggataggcccatgattcttgtagcgaacaccgttgacatagccggatgcaccagctcctaagccataatactctgcattatcccaatacatgaggttgtggcgactttcaaaaccaggcttggagaaattggaaatttcgtaatgctcaaagcccgcacgctccaactcctgaatgatgtattcaaacatctccgcttctaactcctcttttggtagaggaagcttgccccgtctcatccgattcataaagacggtgtgattctctagaatcaagctatagaggctcatatggggaatgtcgagggcaagagccttagcgacattttcctggacctgctccatggtttgcgtcggaagggcatagatgaggtcgatcgaaatattgtcaaaaccagccagcttcagacgatcgatattgtcatagatatcctgctcttgatggctccgaccaatctttttgagcaagcgattatcaaaggtctgtacgcctaaagaaacccgattaaccggtgaatccttcaaaacagcaatcttatccggatccaaatcaccaggattggcctcgatggtcaactcctccatctgagaaagatcaagtgacttggtcagctccttgagcagatactctagctgatccgcagttaaggctgtcggtgtcccacccccaatatagagagtccgtaaatttgtgatttcttcccgacgaaattcttggatcaaatgatccaaataagcatcgaccggttggttcttaataaaaaccttcgaaaaatcacaataaaaacaaatctgggtacaaaatgggatgtggacataagcggacgttggttttgtatgcatacctttaattataccataaaatccccctaagtccgagaagaaaagggtggatgacgcaaggatttccttgacaagaaggaatgaaaagaatagaataaaactaatcacattcggaggtaaggagatatgaacaactaagtttcgttaaataagatactttatttagtggactgcttgttctatctcttttcgtgtgccctctcgcctattgtccaactttttgttggcttaataaggtctttttctgtttgggtttcacttgaatacagctctactaaataggtagagctgtttttttgtcccagtagaaaggaatcttatgctaaaactatcccacctcaccatccgccacacaaaagatttacgcgatttggttcgcgatctgtccctaactattcatgaaggggaaaaagttgccattattggcgaagaaggaaatggaaagtcttctttgcttcatgtccttatgtccccaaaatccctaccagattatatgaccatagaaggtgaaatcaccacttcttttcactcctatgcctatattccccagactttgccggaagccttgaagggaaaaagcttggaagaatatttttttggagaggatgagctagactatgccaccctctacagactggctgatcaattgcaatttgatagcgaccgctttgcgagcgaccaagctattggaagtctatctggaggagaagccctcaaagtccaactgcttcacgaactttgccgtcctcatgaattgctatttttagatgaaccttcaaacgatctggatttggaaaccctggactggctccagcagatgatccaaacgagcccccaaaccatcctatttatttcccatcatgaggattttttgacgcagacggcggataccattattcatctaagacagatcaaacaccgcaaggaggctgaaaccattgtagagcacctaggctatcaagactacagtagccagagggagcaacaattcaagcaacagactcagcaagctgccaacgatcaacgaacctaccgaaaaacaatggagaagcatcgccgcgtccgtcagcaagttgaaacatccttacgaaacactaaggatagcactgctggacgtctcctggcaaagaaaatgaagtccctcctctcacaagaaaagcgctacgagcgagaattccaatccatgactccccaaccctatgatgaggaagtcatcaatctgcattttcctcccctcactcccttgtctcctcaaaaacgagtccttctattagatcaggaagaactcgccattggtgatcgggtcctggtcaagaacctctcccttactcttctaggacaggataaaatagggattatcggttccaacggtgtggggaaatccactttcctaaaaatgatatggaaaagtctacagaagaatgaaagtatccgcactgcctatatgccacaagattacactgaaggcctccctctgactcagacaccggttcaatttctacagcattcaggcgatcgcgaagaaatcaacaccattcaattgcatttagcctccctcaactttacctattctgaaatgcaccatccgatctctgaactttctggtggccagcaaggcaaactcttcctccttcaattagtactcacaagtccccagtttctgctcttggacgagcctactcgtaatttttcccccacttcccaaccagaaattcgtcgcctattcgcagactacccaggcggactggttacagtatcccacgatcggaccttcctcaaagaagtctgccaaaaaatctatcgcctgaccgaaaatggtttggtagagatagaggctctctaacgtaaaaaagattggccaaaaaaccaatctttttctattccttcgctgcctcttgtcccatttcttgggtgcgtttgtatgctgcttccactccagcaatgatgtcgccccgtaagccgacttgttccaggcgattgactccggcaatagtagagccacctgggctacaaactgcatctcgcaagcgggctggatgttcgcctgtctctaggaccatttgactggctccttggaaggtctgtgccgccatctgcaagacttgctctcgtgtaagtcctaatcctactcctgcatctgccatggcttcaatcatctgatagacaaaggctggcccgcagcctgcgacagccgttgcaggatccattaatttttcctcgatctcgtagagagcccctgctcctgctaagagctgcttgacctgggctatctgctggtctgtcactgcttgggagcgggccagactgataacaccttgaccaatggccacaggcgtattgggcatgatgcggatgatacccatctggtcgttttggaacacgtcagccatcttttctaattccaggcctgcggccatggaaaccagcaagagattagagcgttgagccaagatgcctttatactcttctaaaagtgggcaaatctgatagggtttgacccctaaaaagattacttcagcttcttgaaagacttgttcaagatcagacgccgttcccccatactggctgataaactcttgcaccttttgaggagaacgattgaccaagagcaagtctgtggcagccacttcttttgcaactgctttggctagactagcccccatgtttccaagaccgataaatgcaactttcatttcttacctcacttgaccatttccactgacaatatacttataactggtcatttcccgtagtcccatcggtccacgcgcatggagtttttgggttgagatccccatttcacaacctaggccaaattgacccccatctgtaaatcgtgtcgaggcattgacataaacagctgcagaatctacctgcttggtgaagtaagcagctgtctcaggattttcagtcacaatggcatctgaatgatgggtgctatgagcttcaatgtggtccaccgcttcctcgactccatcaacgatcttaactgctaaaatataatctaaaaattcggtatcaaaatcctgttcctgtgctgctgttcccgaaatgatagcctgcgcttgctcatctaggcgcaattcaacggatctttcccgtgcatccactaaacgctctttaaccaaaggcaagaaatcagacgcgatcgctcgatcgaccaagaggacctccatggcattgcagacggatggacggcttgtcttagcattttcaataatggcgagggctttctggaagtcagcctccttgtccacatagacatggacgatcccagttcctgtctcgatcacggggacaatggcattttcaaccaccgcttggatcaatccagcaccaccacgtggaatgagcaaatctagatagcccttagccttcatcatagcaaggctagaagctcgactcgtatcttggatcagttgaagaagatctggatggagtccgccttcttccaatccagccttgagggctgtcacgatcgcttgagcagaatgaaaggcgtcctttccagtacgaaggaccactgcatttccactcttgatggcaagcgctgcagcatctgacgttacatttggacggctttcataaatgatgccaataacacccatggcgactcgaactttctggatttcaaggccattttccaagacttcagtatccagcacttccccaatcggatctggcaggtctattaaagcacgaattccttgtgccataccggcaatccgctcttgatcaagaaagaggcgatccagcatgacttcagaaatcttgccgcgtgctgcttccatatcgatttgattggctactaaaatggcttccgtcgctttcaaaagctggctagccatggcctccaaagcctgatttttaagagctgtactggctgtattgatgcttttcttagctgatctcgctaaggctaattgttcttgtgttgttcccatacgttgtcctctagaattctgtaaagagtaagtcaatttcaggagttaccgagatccagtcatcccggtggatgaggattcccttggcttttttagattggagtagatcgcgcacagctgattggccgagacggaccttgccttttcctagtaattgaccagtctcttgatgatagacgctgacgatatcatgataagaaaaatctccttctgccttggtcacaccagaaatcaatagactctttccatgatccaacagggcttccgctgctccagcatccacccaaacggctcctttactttctgcataaaaggctagccattgtttctgggtttttaagcccttgtcctctgcaaggaagtaactgccatccgcttgctcttctgctgcttcgatcaaggcatcagacttgagagacgagcaaatatagacaggaacccctgactcggtcgcaagggtcgctgccttgagtttggtcaacataccgccagttccattgctactgccagcaccaccagccatctcgatcatctcgcgagaaatgtattcgattcgatccaagcgcttagctgttggatcctgagaaggattggctgtatagagaccatcgacatccgttaaaagcaccaaaagatcagcttgaaccatggctgcaacctgcgcactcaaggtatcattgtcacctacttttaactcggcaatcgagaccgtatcgttttcattgataatcggaatggccccacgattgagcaagacagaaagggcctggtgggcattcttatagcggcgttgatccgcaaagtcatcctgggtcaacaaaatctgcgcagaaacaatgttgcgtaagagcaggttggctgtatattcttccatcagtaagccttgcccaactgccgcagaggcttgcttgtctgccaccttagtcggccgtttcttaaaaccaagggcgccaaacccagcagcaaccgcccctgatgagaccaagatcaactcatggcccgattcgtgtaagagagccaactgctgggtaatgaccttgaccttctgtctggagagactcccatcgggattggtcaaagacgaggtccctactttaaagacgattcgttttgctttcatctctatttttctttctaatactatttatttcgtatgtaatgaaagtgactgaatctccattcagccatcttcactatccttttcgaaggtcttccagcgttttctcaaagatcgctggcacttctgccgtaaattccaaggtctctcctgtacgaggatgggtaaagccgagtgtccgcgcatgcagaaactgtccttgtcctttgagtgtcttcttaggaccataagcaggatctccagctactggatggccgatataggccatgtgcacccgaatttggtgggtgcgaccggtctccagttgcaactctaccaaggtgtaatttccaaagcgctccaagacttgaaaacgggtcactgcaggttttcctttcgccgtcactgcttgttttttccggtccttttcactgcgaccaattggtgcttcgatcatgccccgatcgttcggaagattgccatggacaatggcccaatacttccggagagattttttgtctttgagttcctctgctaaggcgacgtgggcttggtcattttttgcgaccatcaagaggcctgacgtgtctttgtcaatccggtggacgatccctggacgcaattctccattgatccctgaaaggtccttgacatggtataagagcgcattgaccaaggtcccgctggtatgacccgcactggggtgaacaaccataccctgtggcttattgaccaccacaacatcctggtcctcatagacgatgtctaagggcagatcttctgcttcatagctgacctcttccacttctgggacttcatactggatgatatctccttctttgaccgtatacttagcttttttcacggttccattgaccagaacttttccttctttgatctgctcattggccacagctcgtgacaagggagtcaaatccgccaaagccttatccagtcgcgcaccggctacttcgattttaatttccatgcgtttcctctttcaacatcaggatcaggagcaagaaaactccaactgtcaaataactatctgctacattaaaaatggcaaaattcataaaatccaggtggaacatatcgactacaaagccctgacgcaggcgatcgataaaattccccaatccacccgcaatcaccaaggtcaagcctgtcaccatccaaagcgatcccttgaggtgcttatagagatagtaaaaggcccccaccatcacgactagcgtgatgagggtaaagaaccattgctgattttcaagaagcgaaaaagctgcacctgtgttttgaagataagtcagactgaccacatggggaataaaagacttgacgacacccagtggaatgttcttcaccacataccatttgaccagctgatccagtaggaccaaaaggacgatcgctactgggaccattgtttttctcttcatttcttacctcttttgatcaaaatattctaccatgacctcgacaaacttctctgctacaggagagagatccatctcttcgcgtttgacatagaccattttattgtctaagttgtcttccaaaggaatcacggtaatgccattcacggactggctatccaaaaagccagatcccgtcgcataagcatccgtccgctccaagattccattcaaggtagcccggtcggtcacattgaacatttgtgagctcgagctggtatcgacaaagttctctgaataatagaggtactcatctttttcttgggtaaaacgaacagttggcaactgagctagatcttccataaccagttttttcttcttagccaaaggatgtcctttgcgaagataaatatgagtctgaaaaggaatcaaatccactacttcaagccctaatttatcgacccgttgcataatccccttggtattttgacgattgagataaataatccccaactcactatgcccttgagccacttcgtccaaaatttgaaccgtcgttgattcaaagatgcggaagtttttattttccggatagcggatcgagaattccgtcatcaaaggtggcaagaagtcatagtgttgactagaaatagagaattctttcttctcttcttcaggactggcatattgattttgaaacacatcaaaccctttgaccacgtcctgcgctttttcataaaattccattccccgacgggtcaaaaaagtcccagaactggtccgacgaaaaatcttaaaccccagttctttttccagatctctgacggagatggacaagctaggctgactcacatacattttttcagcagcctcacgaaaagtaccactgttggcaatcgccactacatatcgtaattgttgtatattcattctattttccttattacagtatcgatctattataccataaattaggggctgaaagaagagatccgtttaagagacactcatcaagtgaaaataaaaaactggaactaaaacagttccagttgatacttattcaatcacttggctttcagctactttcttgtaccaatgagccgatttctttggatagcgctcttgggtttcaaagtccacataaaagagaccatagcgtttttcataaccattagaccaagagaagacgtccatgagagaccagatgaagtaacctttgacattagcaccatctgcaatcgcatcagacaagacctccaagtgttgcttcacataatcaatccggccatcatcgtaaacagtgttgtccacaaattcatctttgtatccaagtccgttttcagtgatgtagatcttcttgtagtttggataatctttcttgacacgcatgatttgatcatacaaaccttgagggtagatgatccagtcccaatcagtacgaggtacatagtcaggagctacacgacgtccaacacctttgatttggtatttagagcttcctttttcccctttaccgttgtggatgatttcagtttcaccatcaaaggcttccatccagtcactcatgtagtagttaattccaaggaagtcgtttagatctttagctgcttcaagtgctgcaaagtcttcgtcccgaagatccagactaccaccattaactgaaagaatgtggtttaccccttccatggtttcatctgaataatgaccgaggtaagtagcatccaagataaatttgttgtgaatgatatcttccaactcagcagcacgtacgtctgcaggatttttaggatccaatggatacttagttggaagagcatgaacaaccccgatttcacctgtataccctttgtctttgtacaatttcacagcacgtgcatgagaaaccatcatattgtggtgtgattggaagactttggcaaggtcatattgaatacctggtgggaatttacctactaagtattgaccatcaccgattgggccaatttcattgaaggttgtccagtagttgacttctgggaattcttcaaaacagaaggcagcataatctacaaagtgttcgatattttcacgattcaagaagtctccatttgagtgaagagcttcaggagtatcaaagtggtgaagagttacgaatggttctacatgacgtttatggcattctgcaaataacttatgatagaattctaccccttttggattgacttcaccataaccagttgggaaaatacgtgaccaagcaatagaaatacgaattccgtttacgccatattcttcagccaactgtaagtctactggatatttatggtagaaatcacttgctggttcagcagtataccaatagttgtctgctaagtatttgtcccatgcaactggtcctttaccatctgtatgagtcgcaccttctgcctggtaggcagctgtcgccccaccaaaaataaaatctttaggaagtgtttttgtcattttttcacctatttcttaattgaaccaaatgaaaagtgagcggagaggagttagtgagccatccatctccatctcacttcttgttccaagccaccgaattgtgacatgaggaggtaaaaacgatatatttttaccgacgaattaacaagtcgattaggaaaatcgccatagcgatttccgttacgataggagactgtttcacagtccctatcgttaatcgaattgcgcttgaacgaatgcaagagcgcctttaccatcacgtgtcaatttgatgtattgagcaccttctgtcttagccaatttaatgcctagtttatctgtttctgccctcatgtcttcatagttagaagctacttgaggggcaaggataacaaggtcaaattctggcaacatttcacggtgagcaccgtaaccaccagcagcggcctttacaggaacattgtattctttagcagctttattcaaagcatttgcaagaagaccacttgtaccaccacctgcacaaagaaccaatacgtttgtttcttttgtgatattgttttgagctggttcattttcaacaccagctttttcaagaacagcatcagctttcgctgtattgaagtttgcagctactttttctttcaattcatcattagatttaccagaacgttcttcttcaagaatttgttcatcataaactttaaggaatgggtagtaaataactacgtccactacgataagtaatgcggcaagaacaaatgatagaaattggaagttagtaccaagaactagaccaagtggggctggagttgtccatggtaggttagcagtaaatgagttcattccaagtgtatcgataaagaatttgaaaatccaaacgtttgcaattggagcaaagataaatggaatgaagaagattgggttcaataccaatggagcaccgaacaagattggttcgttaacaccaaagaatgttgggactacagatgcacgtccaattgcacggttacgttttgatttcgttaaccacatgaacataaatggaacaacaagagtcgcaccagtaccacccaaagtaacaataaacatttgagtacctgaagtaagaatcttatctgcgtgcattccttgttgaatcaatttcaagtttacttcagcatttgcataagtaatcgctgcgatagctggctcaacaattgaaggaccatggatacctacaaaccagaagaaggcataagcaccaaagataattgtaattccaaggtaaccgtcagcagctgagaatagtggagcaagaagggtaccgattgattcagcaaccgttacatgaaggcttgctttaacaactaattcaagtgcgtacaagagtacaactgataatgtaaatggaatcaagtctttaaatacttgtgaaatatttggtggaacctcgtccggcatgcggatggtcacattgtttttcacacagactttgtaaacattaacagtaatgaatgcagcaataaaggctgttaacaaccctttagtccccatgaatgctgttaagaatccaccttctttagcaggttcagcagccatgagcaagaagccaaccatagaagccaacattgttgaaatgaagtttatttggttggttgctgggaggtcacggttcattgaatctgtcaaagccttagccgttgtcccaccaacgaagaaggccaagatgcccatagaatagctatatggagtcatcaataaagtttcaatatctttagaccaatggaacccccaagcgtttggtacatacgcaattaggatgaagatagatgagaagaggatcacaggcatccctgcaatgaaaccatcccgaatcgctcgcaaatatttattacgagaaatcttttcaaagaaaggtttccctttttcaattagttcaatcagtttattcattattttgctcctcttttatatagttcaatcagatggtgaatcacgtcttttaataagatcgttgtcatgagatggtcttgaccatgcatcatggtgatgctataggggatttcttctcctgcagcttcttgcgctagcatggtcgtttgagatttgtgagcctcagcgatacaggaccctgcttcttctactaaggattctgctttcgcaaaatcaccattttcagcagcttttaatgcttctattaattttgatcgagcgtcaccggcataagcgacaatttcaaacccaagtaattggacttcttctttattcatgttggttcctccttatgataccttttgaaaatttttataatagacgttgaatatgcaaggctaaatagactttttcattaggagatatcttagctccagtctgttcagcgatggtttggtagatctgatgactaatctcataagcctttggataacttagctggatcagttgttccatctcgctcaagccttcaggatcctctcttcccttatctagggagtcaaggaaataattaagatggatcataaagcgatcgtagaaatgactgttctcttcttttcgtttcaatccattttgagctaatttttcctctacagctttcaaaatcgcttggcgatcttggacatcaggatcctgctcatgaatgacttccccttgtgcattgatgaagtgataggcgatacgattcacttcgtcatcaggaaattgatccaagagccgctctcgaaagatttcaatcgcttcttttgcaattttataggggatcggatgcatagcagacgcatcaggaagatcactgtgtttatatcttccctgttgaactgcctggtaagaacaaaagatgtgatctgttagtgtcacatagatatattcttgaacaggataagcatatttcttagacaaggtatcaatcacttcataagtggttgtaatgaaatcaagaggaacatcctttagaagggccataaagttttctcttgactcatccgtgtttaaacgaaatactttttcgaccttatcatcagccactagatcatttttctttttcccaaaagcaatcccactcccaataacaattaactcttgttgtagttcattttgaaccaaagcaacattattgttcattggatggataatacgatacatgaggctctcctttgtgaaatttgttaaaagcaaataaaaatgaccacgaagcaactgaaaaaactagcctatgctaatcattcaatctacttgtggtcacgcctaatctaacttagtaacgctcactgctatttaacttatgaacttattctatcataagttttttattttgtaaacccttacagcgaaaatttttaaacattttttataaaaaataaacaaagcctaaaaataatgaagaacattggaaggaatttcttccttccaatgttctaaatgttgctttaggaggcaataacaatttgtttcttacacgcgttctgtccaaggtgttgccactttagccaagactgcgttcaattcttcaatattttgacgaccttctgtacgaagccattcacgagcagctgcttctccatctttgatgtaagcttctactgaacctgcccatgtcgcacgtccacaaagaacaccgttgaagttagcacctgatgcatgagcaaattccaaagtttcttggaagagttttgcggatacacccgcactgagatagatgtatggaaggttggttgcttcttcttgttctttaaagaaggcagcagcttcttcacgactatagacaacttcaccttctccaaaaccttccacgtagttgacattgacaggaacttctactttcaatacatcgatattgaaacgaggatctgagaagattttcatagcttcaatgactttacgaggtttcacttttgcatattcagcagaggttgcatctgcaattccttcatcataagccaagatttcaaggaagaatggaatgtcttctgccacacattctgaaccgatgcgttcgatataagcttgtttttcttggttgagttcatctgcactgtctacatcatagtagagcaagaacttcacagcatctgcgccttgttctttgatgcgttttgctgaccaaaggttcaagcagtcaggcaagcgtttggtgctagaagtatcgtagcctgtcttttcgtatgcgagcaagagtcctgcatctttgtccaaggcttttgtagcaggtagaccatattctgggtccaataacatagatgaagcatattttgtcaattcatcagctacaaggacttttaattcttccatttgtgctacagttggctcagtgtcttggtatttggccatcaagcgtttcaaagctccacgttggtcgaaggccaaagctgaaatgacaccgtcttttgtactaagacgttccaaatagttgcgtttttgttctgttaataccattttatacctcttttacgattaattgttgatacaaggcatcatagtgccccatgttgacatgtcctgtttgcgcttcttgcgcatttaacattccaagaacatttgctttcttaagcaagtctgcgtcactctcatgatgatagagaccagatgcaatccctgcaacagtcgaatcaccagatccgactggattgacgacatcgatcttaggaatatctaccttatagaagacatccccatgcttagcgaaagcgccatttgcaccaagggagacaatcacccattcgatgccatcaaagagagaatcctgaagaacttcttttaagtcttccacattcttactcacttcttttcctaacaactgtgataattcttcattgtttggtttaatgaccgtaggcttgacagctgcttgaatggcagcttctaaagaagctcccgagcaatcgagtacgactggtttcccagcttcccttgcaatcttgacaaggctagcatagtagtccactggtaaaccagcaggaagacttccagagatggcaacaacctctacttgttcaaccaagtgacgataatggtctagaaagtctttcccttctttctcagaaatggttggacctttttctaagatttctgtttgcttgccttcgtgaaggatggcgatacaattacgtgtatctccagcaatttcaaagaaacgttcctctatcccttctcctaaatgatcgagaatgaattgccctgttcgaccaccaagtaggccagtcgctgccactggatcctttatctcagaaagtacacgagtaacgttaagacctttcccaccagctgtcttactcacctcagccacacgattgactgtatccaactggagtacatccaaaggataagaaatatcaatcgaagggttcatcgtgaccgttaatatcatacgtcacctcttagtcgtggtattcaccacggtcccatttttcaaggaattctgtaaagaaatcagcatccgcttgatgagcattatgtgtttccacatgttggatcttagcgatcaattttttattttcttcagttggtttgtattcagcgtggataaatgcttcaatgatatcgcacatgagcaattcaccagtaattttaccaccaaatccgatgacattcgcgttcaattcttcttttgcatagagagcagttgtcatatcgcgtaccaaggcagaacggataccaggtactttgttaacagcattgttaatcccaacaccagtaccacagatacaaacaccaagatctgcttggccacttgctacggcttcaccgactttcttaccaaagattggatagtgggtacgtgtatggtcataagtcccaaagtcgagcacttcgtatccttttgatttcaaaaaatcagaaacagccattttttcatttgtcacaatgtgatcacaaccaattgcaattctcatttgaattctcctctcattagcacatcttattcaacatatcaacacggatttggtgacggccgccgtcgtatttaccattgacgaagcctttggcaatgtttttcgccaattcatctccaacaatttcagctcccatggtaatcattcgagaattgttgtggccacgtgtcatataagcagaacgttcatctgaaacttctgctgccaccattcctttgattttagtcgcaaccataaatggaccagctccataagcatcaatcacgattccaagattttgatcatttttgttcacttcgctcgcaactgcaagtgtcacatctacaaaatcttgaccttcagcggttacatctacaacatcgaagttttcttttacaagaaactctttcacgagatcttttaatcttaatcctgcagcatctgcaccaattacaatagacatgtcctgtcctccttttgtttgtttcagcaaatattcctgttgttaatttttcacaaagaaacattttcttacttttgatattatattacacctattttgaacgaaagtcaacattaaattgtttattttcgaacattttttaaaaataaaaacaccatatctagaaaagatatggtgtcagttttcaaactacatggaacgattattttgcatttgcagcatattcttcgttacgtttgatcatttgttttctgtaccaagcgaagattccgatatagaatgctaagaagacaactacaccaaggatagccttgatatcaccagttgttgcgttaccgattgtccaaccgagcaatttttcaactggtccttcaagagttgagtgagtgatcaattgagtagaagctacccctttagggaaggcatcaacactcttagccaattgagttgcaaatggtgcaatcaatgtacctgaaagaaggaagagtggcaagagaaggcttccaaagatgatcatacggatcaatttaccgcgtgttacaaccaacaaggctggagttacacccatagcgatgatacctgcaagtggcaagataccatttccgactttagaaagaagcactgcttcgatcaacatgattggcgcaagtacgttggcacaagcccagatttcagcacgaccagcgataaatggccagtccaaaccgatgttgaatttacgtccttgaagacgtttagtagcaacgtttgtaataccttgtgacaatggttctactgctgcgatgaaccaagaaccgatcaatgagaacaattccaagcagacaccggcagtcaaaccaaggctcaaccaacctttaataaccaattcccatttgtcagcatcttgtacaccagcaactggatgtggagtacccatgataccgatgacgattccaagaaggaaaccgataaagaatttagatccccagaaaccgatcttcttgttcaatttagcagcgtcgaagtcgtatttatcaagacctgggaagaatttgtcaaagattttatccaagaccatgatgattgggttcatcatgtagttcatgtgagtagatgtcataggtgatgaacttggtgcattcaacaaatcatcaaatgttggtttcatcaagtctgagttgatgattttcataacccctacaaggacaacggcaagagttgcaacgaaaagtgaaactccttggctgacaccgttattgtcagcataccatttgatcaaaagaccagtgatagacaagtgccagatatcgaagatatcgacgtcaagcgtatccgttttcttgatcgcaagcatgataacgttgacgatcaacataatcaacaagaagtaaagtgtccaggcagacccccaagtaatggtcgcaagaggcgcccaaccaacgtctgtgatattcaattgaataccagtattctcaacgaattttgcaagagatgctgagaaagctccattcaacataccgatgatagcaccgataccagtaagggcgatggcaagtttaataccaccttcaagcgctttggagaatttcactccaaacaaaagtgccaatagagttaggacgatcaacatgatgatcggagcacccatgtctaggatgggtttgaaaaatttattggcaaaatcaataatgccattcataataaatcctcccgatttatgaatttttttgtaatttacagcataaagtgttcccaattttataattggataacgcttacaatcatgtttaaaaaaatattaacttaatccatgttctttaatggcagcttcgatgttatcaaagactggcgcactcatcgctggaatacggaacaagattggtcctgcttctaccactggaataccaggatcgaatcccaaatcagtagcagcaattggagtaaagatgtcataaccagaaatcaaatcttcattgacgtctttgaccatgacagcgtcacaacgcacatcataaccacggtttgacaactcttcttccaaagcattcttaatttggtggctagagttaacacctgcaccacaggcagctaaaattttaatcatttggatgtcctccattataaatatttacgaatgttttaggaaatagtttccgtaatgtattgataaagcttatcttcactatctaattttgatagagcttcgagatttccattggatgtaaagaaatccatcagttgggccaaaatattggtttggcttgagctcgtattattgataatgaagaataaaagtgaaacttgaacttccttatctggagcaatcatattatggaaagttacgggttgatccaaacgaaccacaaccacattctcagtgagattatggacaatgtctgtgtgcgggatcgccacatttggtaagtccttaccaagaaattccatgtctaatccagtcgggaaagacttttcacgctcaatcaaagcggaacgataggttggtgtcacaatctgtcgctcttccaataagcttgctacctgctcaaagagatctgtttgatccttggcatgtaggcaaaatacaagatctttgttaaagagttgatttaatcccattgttgccacctccttatctaactatttatttatagcttcagtatatcactatattgattgattgtcaatcattttttgtctaaatttgtttaattttgtttgtatatctctctaaagcgctttctatccgtcattttccaacatccttaaatcagtaaaaagtggtctcttttttgagaccactttgttttatatgattttcgtatacaagccgtatttgtctttgatcttctttggaatactatcatcggtaataatggcatttagatcttccacacgatagaaactgtagaaggaataactatcaaacttgctgttatcagctaccacatatttctctatcgcattgttcagaataatggcattgccatttccttcttcttcattagctgtggagacactatggccatcgattccattcaccccgataaaggctttagaaaccttgatttctttcaagagtttattggcaaattgaccgacaaaggtttgtgtctttacccggtagcgaccaccaactaatatcaagtcataattcgggaaatccttgagcttctcaaaaataggcagggagttggtgacgatgctaatttctttcccttccaaataatctccgataaagtctgttgttgtaccagagccaataaagacggtatccccattttcgatcaagtctgcacattttttggcaatgcttcgtttctcatcaatattgatcagatttttttcactgtgagaagcttctaataagctatctttgacttttttgtgggccccaccatgtacacgaactaaaagaccttgtttttcaagatcaatcagatcgcgacgaatggtcatatctgtcaccccaaaaagttccttgagctctttgaccgataccacactttttcgatccagttcctgaagaatttcaacatgtctgctatctttcatggtactacttccattcctactatatttgtctctattatactacatttttcaaaaaacacaaattcaaacattatattaacaagagtaaacacgatatttttaaataaataaaagaaaaaagccttccgtcaatccggaaagctttgatttatgctatttctagcttcctcaccttaatatttcaaggctcgggataaaaaggttcactgaacctttttattttgcgattgggtaaacagaaacttgttttttatcgcgacctttacgttcgaagcgtactacgccttcaacttttgcgaacaaagtatcgtctccaccacgtccaacgttcacacctgggtagatgtgtgtaccgcgttgacggtaaaggatagatccacctgttacagtttgtccatcagctgctttagctccaagacgttttgcttgtgaatcacgtccgtttgatgtagaacctccaccttttttgtgggcgaaaagttgcaagttagcaagattcaatttcaacataattgttttcctccatgttagttttctgtgataactcttgtttggacgaactctgaagagttctccgataagtttgccatccctaagaaaaatgattcaaagaatagttgggtcatttctctttgatgtggtggaatatctgtcgggatagtgacccgaaggaagccaccttcttcttcgtttaattctagatccggttcgtagcctgcaaatttctcaacagagttgataaagttaatggctagagtcgaaaccgatgcacacacgacatcaaagccgtattcaccgcttccagcgtgcccagtgatttctgcactcctcagctcgccatcttcggctcgttcaaagactgcttgtatcatgtgttctcctaaaaattaagcgttgattgcgttgatgacaactttagtgtaaggttgacggtgaccttgtttacggtggctaccttttttaggtttgtacttgtaagtaacaactttcttttgttttccttgtttttcaacagttccaacaacagtagctcctgaaacaagtggagttccgacaacagtgttttcaccaccaacaagaacaacttcgttaaatgtaacttcttgaccagcttcaacgttcaatttttcaacgtagactgcttgaccaacttcaactttaacttgttttccgccagttttaatgattgcgtatgtgctcattatgcacctcctatgtatttttgggtttccccgtatttttgtgaagactcgcctagcatcgtgggacgaaccacttactctcatggaaatgagcgacgatgttcgagcggttgcacaggcatgtgcatagtcaactctctaagtatatcacttctatcagacaaagacaagtatttttgcgctttgaaagcgaattttctttgaaaaatctattttttgtatcttgtagtttaagatcgcattcaaaaccggctttcatctacttatccttaaatttaaagtcattaaagctcattttggctttagacgaatcgttcatccccttcattttttcttcttgttccttagtaatttttatcggaattgctgcagcagtatttggttttaacacacccgattcgctcacttcatagtcaactgtaacatctttaaaaagtggctctccatcatattccaaattcaggacaaaggatccatcacgatcgatggttgtggtggtacgattcacaataaagaataaggcgaagcgattttcctcatttccaaaggtatatcctgggaaaaagacaaataattttccaggttctccaagcgttggatgttccttgataaatttctcagatgcttccaagacttcgttgtcctggtctttgtactggtcggctctgacaaatgtgaggggttcttttttactgctggttgactggctggtcttttcttcttttttcgggccagtaaatgatactttgacgcagcctgtcaacagaagcaaacttgtcattaaaacgataatttttttcatcttgtctcctttaagttggttagaaaaagaggctggatactcccagtctctcctatagcaaatcctcaatcaggtcatcgacctcatctttttctgcttttggtgtgatctctgttacgatgatacctgctaccgcacgctcaaccaaagcttccacatccatacgttgctcatattgctccgcatttttgagttttggattggtctttggacgatccggtgcaaagatggtacaacagtcttcgaatggctggatagaaatttcaaaggtatcaatggcttgggcaatatcgatgatttccaatttgtccatggtcactaccggacggataaccggcgtattggttactgcattgatggcttgcatactctctaaggtttggctagccacttgtcccaaactttcaccattgataatcaccaaaccacctcgaacctcgcgaatgcggtctgtaatgcgcatcataaagcgacgggtcaaggtcatgaggtaagcttctggcgcttttgccttgatttcttcttgaatctctgtgaagggcacctcgataaattggatattgcccccaaacttggtcaacttccgtgttaaatcatgggcttttttcagcgcacctgggctggtataaggtgggctagcaaagtgtactgcctcaatgtccacaccccgctttaaggctaggtagccagctactggagagtcgatcccaccagaaagcatgagcatgcccttaccagacgtaccaacaggaaggccacctgctcctttaatggtttcataagagatgtaggctgcttcttctcggatttcaacctgcaagttgatatctggttttttcatctgagcttggatagttgggatcgcttcaaagaccgcacctcccaaggtttgattgagctcgcgactatcgagttcaaaggtatggtcactgcgcttacttgagattttaaaggtcaagccgtccttgtaaatctccttcatgatctcttgcacagccgcttttaaggccggaacagatttttcaatcttgtaaacgggtgaaaaattttggattccaaaaacctgcttgagggattctgctactggctcataatctgtcccatgcagataggcatgcgcccgatcgcggtcagctgtcactttgacagctggatagatagataaaacatcttggatattattgcgaagtttattgataaaacgcatacggttctttcctttagtagaaagctctccatagcgaatcataatttctgaataggttaaggtcatgttgatttccttctaaaattaacgtacttttcgtgtttgctcgtaaatcagtttgaacttggttaagaattgctcgacttggctcatgtctttttcaagatcgagactcaagcgaacagctgtctgtgcgatactcttatccactcccatagcaatcaaggttccagctggcttaccagctttggacgagcaagcactggttgtcgagatgtaaatatcaaactcttcaaaggcatggaccactacttctccacgaactcccttgatcccgaaagtcaagatgtgaggcgcaaagtgatcctcaccagaaaagatggtgacatctggatagttggccaattctttgcggatgacttctttcatctgctgggtcttgttggcaaaagcttcttggttttccatagctaagcgtagggcttttgctgttgctgcgatgcctgccacgttctcggttgtcgagcgcatttctttttcttgaccacctccggttaagagaggggtgatctttttgccttctttgatgtagacaaagccgactccgcgaagtccatggaatttgtgactagagaaggtcgcaaagtccacgcgctctggtagataaacttctgttgctacctttgccaaggattgcacagcatcgacatggaaactaatcgttggacgatcttccaggagagctgcgatttcatggatgggctggatggaaccaatctcattgttgacggccatgacagagaccaaggtcgtatccggacggagaagactagccaaggcatccaccttgacaaagccacgcgcatccactggagcgtaatccacttcgaatccctgcgtctttagccaagcagctgactccttgatagcgggatgctcgatgtcagagacaatgatatgcttgccataaggagctttctcaaaggcgacaccctttaggatccagttgtccccttctgtcccaccagacgtgaagtaaatttcctcagctttcttgccaattagctccgcaatttgtttccgagaagcttccaaaatacgagtagcttgactacctagattgtgcaaactagaagggttgccccagatccgagtcgctacttctgtataagtcgcaagggcttctggatagggtttagtcgttgctgaattgtcaaaatagatcatgtcctacgcatccatcactttctttttacgtaacttctattttatcatttctaaccgcttgggacaaggatttgataaagagagatgcggcaaaatcactctataaaattcagttctttttagacatttttcagaaaatgacttataataggaaagtgttaaaaaacaatttttgatagaaagagaatgaacatgtcacaatattcaagaagtaacaaaaaccaaaaacctgaggaaaaagttgatacaagaccatctcgcggtgagaaagtcaaacaaggtttgtccgtatttcaaacggttgtagctacgattgccagtctcctagggattatcgtcacttcctttaccatcatgagtctgctcaataaagacaatcaaaaaacagaagacaaaccatctagtagcaccagcgtcgtcgtggtccacgataagggatctgactcaagcgctactaatacagatgctaacaccaatacacaaaccaattcaagcaatacagaaacaagttcacaaaaagaaaccgatagctcatctgctactgaatctagctcgtctgccgcacaagaccaaggctccacagcaacagacagtggcgcagatacagcatcatctggaaccaactaaaaaatcagtaaggacaaccttactgattttttttatctttcgattccagctttttctgatttttatagaaagcatctatctcgttgtcatactcccatttgagctttgaacgctcttcctggaattgatccaatcattcatatggaaactttttgggtctatatctgtaagctgattctgctaatgaagcatatagattatcaaaactttttaaattccaattagtcaaataatctccccccaattctaatgtcggatcctatatacatctcatctaaatttaatgtattgtcctcattaattgggatatctactccccaactcgattcttcaatatgatttatacctccataaacactcatgtaatattcaggagttgtcagtccaccatcaccccactgcgtctgatcccaatcaatctgaacggattcaacttttgaattttgtgctttgactaaatcaataaccttctgttcgtgttcttttagatagtccagttgttctttttttatgtcttcatctggtttttgtacgactttctttgaagatgaggtcgttatcttctgttcggggcttttggtcagggtcatgatttttcctccaagaaaaaccagtcctaggatcggtaacaaaatgatcaaaagtagttccatttgtctcttcataaatcctccttacaggctttgaatcttccagttcttactcaatataatcacccttaatactaatattatagcccatactgaaagtcatcttttgatcagaatcaaatacaacatccaccctccatcctgaatcttctagctgattgactgtaccaaaaatttctatgacctcatctccaccttgtggtgtcccatttccaccctcaatccattgcgtttcgtcccaataaatttgaacagattcaatctttgaactcttcgatttcacaaaattgactatttcttgctcgtgctctttgagataagcgagccgtttttgtttgatcacttctatatcttctttggaggaggaagtggtgacagtttgtgcttgtttcttatgcgctttttgctttacagtacaacctccaatacttgtgaaaataagcattaaagctaataacttaagtgtacatttcattttatttttcattttcctcctaacactaatacttctatttacttaggaaaaaattttccagccaccattttcctcgatatagatatcattaagcatgtccatttttttgatagttggtatgctattttgatcttctaagtaaaaatcaacggagaattttgtgttttttaattgattaattttaccagaaatagataaattgtatccaccaccctgaggcgttccattcccagactcttcaattaccatactattccaatcaatctggacggattcgattttcggactttgagctttcacaaaatcaacaatttctttttcatgttctttcaaataggctagctgtttttgtttaatggtttctttgtcctcttttgtagttgaagaggtgacagtttgcgcttgtttcgtttgctcttttgattttatagtgcatccttcgatactaaataaagcaattatcgattttactgttagcaaaataattttagtatgtttcttcataatttatccttaaatttcaacatagatcaaaagaactactactccaatatttcttcaccgatggttatatggttaaatatggaaatttttttcaaatcgattgaatcatcatcattaatcggcatagaggcactccatcctgaatcttcaatatgattcactgttccataaacttcaatagaataatcaggaaacaagaaacctccatcactccatctcacatcagtccaatcaatctgaactgactcaatttttgaattttgagccctcacataatcaacgatttcttgctcgtgttccttgagaaatgcgatttgctctttttttatttcttcttctgatttttgtacgactttctttgaggatgaagccgttaccttctgttcgggtcttttggtcagattcatgatttttcctcctagaaaaaccagtcctaggatcggtaacagaataatcaaaaaaagttccagtcgtcttttcattttttcttctccaatccttcctttcatgactgaatgggccagtcactttccttactattatagcatctttcatttgaatctcaatctaactcactagttagagactatatgcagcaatcaaaaaggaaccctgaggttccttttgtgttattttcgatacatcttgacctgaaggtaaagatcgttatagactccaagcaatttcttgcctaattgttgatagacttccaaatggtccagcgtttcatcgcttggatagaaggattggtcatcttggatttcttttggcaacatggctttggcttttttatttggcgttgagtagccgacataaagagcatttttcaaagcatttttaggacgaagcatgaagttaataaaggcatatgctgcttctttatttttcacggtttttggaatgacaatgttatcaaaccaaaggttgctggcttcagttgggacgacatagcgaagatccttattggcttcgagcatttggctggcttctcctgagaaggtaaccccaatagccgcattgttttggatcatatagcctttcatctcatcagcaaccaaagctttgatgtttggcgtcaaggtgtagagtttatctactgcctcttgcaatttctttggatccttttcattgaggctatagcccaaggtattgagaccaattcccatgacctcacgcgcaccatcgtacatcatgatgtcatttctgtactcttcacgccagagatctgaccaatgttcaggagcatttttgaccatcttggtattgtagataatccccaaggtaccccagaagtaagggactgaatattggttgcccggatcaaacgattggttcaagagttttggatcgatattttccatccctttgatcttggattggtccaacttttcaaccagatgctcatccatcatcttagcaatcatgtattcactaggaatcgcaatatcgtaagtggttccaccttgcttgatcttggtgtacatggcttcgttggaatcaaaggtatcatattgcacctgaatccctgtctcttttgtaaattccttgagcaattccggatcgatataatctccccagttgtagatgaccagcttgtcactattcttggtattcatgctcgcttcgatctggtggctaattccccagaggaccagaatgacaaggacaatcccagttaggaatgaataaagttttttcatgctgcttcctccttttcacgggtgataaagtaataaccgatgaccaagagcacactaaagagaaagacaagggcggacaaggcattgatactgagggaaatcccttgacgcgcacgtgagtagatctctacagacaaggttgtaaagccatttccggttacaaagaaggtcacggcgaagtcatcaagagaataggtaaaggccataaagtagcccgcaatgatggctggtgtcagatacggcaacatgatctctttgagcatttgcacttgagtagctcccaagtcataggccgcattgaccatatcccggttcatttccttgagtcgtggcaagaccatcaagaccacaatgggaatcgagaaggccacgtggctagccagaacagataggaaacctagctggtacttcaccgtcgtaaagagaatcaagaagctggccccaatcataacgtctggtgctaccatgagaatgttgttgatggagagcaatggtccttctaactttttcttggattggtaaatataaatggctccaaaggttccaatcactgtcgcaatcaaggctgacaagaaggccaagaggaaggtctctgataagatcagcatcaggcgactatctgcgaacaattcattgaaatgctcaagcgtgaagcccgtgaaggcattcatatctccccctttattgaaggcataaaagatcaaatagaagatgggaagatagaggatcagaaagacgaagcctagatagaaatgggatacttttttcatcgttctctcctttctctcgttgcccacatggtaaggagcatagcaaggatcagaacaactccgatggtggaacccattccccagttttgtgtagtcaggaagtgctgttcaatcgcagtccccaaagtaatgacccggtttccaccgatcatccgtgtcaacatgaagaggctcagactaggaataaagacagattgtacacctgagcggactccattcatggacaaggggaagaccacatgacggaaggtatcccaacgattggctcccaaatcatagctggcattgatcaagtttggatctaagtcatctaagacattaaagatcggcaaaatcataaaaggcaactcgatgtagctggctacaaagataaaggagaaatcggtaaagaggatctgctggggagcgactccgagaaagcttaaaaagctattgatggagccgttttgaccaaagattccgataaaggcataggccttgagcaagagattgacccaggttggcaagacgatcaacatcaaccacaactgccggtgtttgagcagcgtcaaaaagtaagcagtcgggtaggagatcaagagcgtcaccagggtgacgattccggcataaaggaccgaattaaagctcatctttaaataggtcagattttgcgaagtaaagaactctttgtagttttcaagtgaaaactgcccttcaacgttaaaaaaggattgaaagatgatcatgactacaggagccaagacaaagagaaaaatccacaagaaataggggaggataaatagattagaggttgttttcttcatctctttcctcctcaatggcattaatcaaaccagcttcttgctcttccacttcaacgtactcttcgatccgtgcatcgaattcttcttcggtttcgttgagacgcataacgtggatatcttctggttcaaagtctagcccgataacttctcccacgatagccttacgagtggagtgaatcatccactcatttcccaaatcatcataggcgatgatctcgtaatgaacaccacggaagagctgggtgtccactttcacttggagcttgccttcttcaggaagagtgatttgcaagtcttcaggacgaatgacgacttcaactggttcatttggacgcatccccccatcgaccgcttcaaagcgtttgccattgaactcaaccaagtagtcctcgatcatgcgaccatctagaatgttagactccccgataaaggtggctacaaagtggttaatcggttcatcatagatatcaaccggtgtaccagattggacgatttctccttcattcatgacaaagatccagtcactcatggcaagagcttcttcttggtcatgggtaacaaagacaaaggtaatccccaagcgttgttgcaattcccgcaactcatactgcatgtctgtccgcagtttcaagtcaagtgcagacaagggctcatctaaaaggaccactcgtggttcattgataatagcccgggcaatagctacccgctggcgttgaccaccggataatttttggatcgaacgtttttcaaatccagctaactggaccattttcaagacttctgaaacccgacgttcgatctcagccttgtccacctttttcaaacgaaggggaaaagccacattttcaaagaccgtcatatgtggaaacagggcataggactgaaagacggtgtggacatcccgtttgttggtagggacatcattgatccgttccccgtcaagatagacatctccagtcgtcgcatccaaaagaccggcaatgatattaaggatggtcgattttccagatccagatgcaccgagcagggtatagaacttcccttcttccaattcaaaattgatatcctttaggacaacggttccgctatcttcaaagacctttgaaacatttttaaactcaataattggttttttcaattcacataaattccttctttactgcaattaccaaactgcttttcaaacgaaaatgcagcggctgacaggaagacctgtcagaccaccaatacctctcggggacttactagactgccccacctatttacggtatcgataggcactcaccccctctccgactgatgctatcgatggttcactatcaattgttcttcaatacttaagctcttaggcttggccgataatacgaacttctggttctaaacggacgcctgaatgagcttctactgcctcaatgacatgggcgatcaaatcttcgtagtccttagctgttccattatcgacattgaccataaagccggcatgcttttcagaaacttccacaccaccgattcgatagccttttagacctgcttcactgatcaattgacctgcaaaatgaccgacaggacgcttaaagacagatccacaagaagggtattcaaggggttgtttcaactgacgaagatgggtcaaccgatccatctcctgcttgatcgcctcgtgattgcctggtgacaaagcaaatttggcagagatgacaacagcgcctgtctcttgaatcttagaatgacggtagccaaaagctagttcactcgctgacagagtttcgatctctccgtctttggtcaagaccttacaggatacaaggacatgcgcgatctctcccccataggctcccgcattcataaagacagcaccaccgacactgcctggaatgccactagcaaactcgaagcctttcaaactatggtgcaaggccacatgagtggtgtcgatgagtttagctcctgcctctgcttcgatcacatagccgtccacactgatgtcacgcaagcgatcaaacataatgacaaatcccggaatgcccccatcacggacaatgatattggacgcattgcccaggaccatccatgggatttgctcttggttggcaaattggacgatgcgttttaattcgtattgattgcgaggaaaggctaaaaattcagcattcccacctacctttgtgaaggtataatattttaaaggttcttgaaaacggatatcaatcccttcaagaatttgattcattttttcattcatctttctgtctgttctctctctataaaaatacaaactattataccaaatttttgactatttttcgaccctaaaaaacaaaagaagacctataatattcaggccttccttttatcattcactatgcaattttacgagcgatagtacgattcttctgtccatccagagctgatttgaccgaaatccaagcaccaccaagagtgaagacagctaagagtcctagattcaagtaaaatttatctgggacgtcccctgagaatgtcgcttcattgagaagcgtccaggacataccaaatggcaaatccagttcactcatgagcgccaaagtataatctaattggttgaccaaaaagaccgtcaagaccatcaatatagctgaaactaccacaccttttttagtcaatttcttaccaaggatctcataacctttgatagtacaataaccgagggcagcccctgctaaaacagatacatagccaagacgcgctaccaagagggcaactgctccaccgatgattacaccgatcacagcccctacaatccctaaaaggaagttttcttcccgcgcttcataagcctcaactgtatcttgcacttcggcttggtaagctctaaaggttgcatcgtcgattaagaagatcgcatctccaatttgatacagaccaattggtccttcctcacccgtttgcgcattcacttgcacaaattggtggttgagcaagaaatcaacaatatcttggatagctgtccataaggtttcgacagccttgcctttggtcattccacctttgacgacgatcgaggtcaaataaccatcagaagagatggcattaaaggcttttgattgttcttttaattcattccaaagaatttcactatcttcgatcaagtctccttcggaaccttgtttcacactgagtgaaatggtaaatacattcttggtttgagcgccttcaatgactaacaagaagccttcacgctctccatacatcacacaggcttcgccatcaaattgcagcccaagatcggtagcaatactatataaatattctggtttcatgtttccccctaaactttcgggaaagcttgagcttttccccatacaattcccattctaccataggagaagcaaaaaggacatatacatttgtatacatccttctttcatttgtgttacattgaggtttatttctcaacacgaacgccaaatgtgtcaattttaagttggaaaatctgaccatctagcccgagtttttcgagagctgcgacaaaggctgctgtatgctctggcgctaagaggttcatgatcgttgggcctgctcccgacagataggtggcgtaagccccatgcgcatgcgcgacttctttgacctgagggaactctttgacaagagattgacggtagcgctcgtggaaatgatctgactcgatggagcgaccagccgtcagcaaatctcccttgaggagagctgcgatagcgacattggctacgctactagctgcaactgcttccttataagaccattctttcggtaggacattccgactatcactggtcttcaattggtagctcggtacaaaggccacaaggtcacagcttggaaagtcagccgtgacatattggacatcttcaccgatgtagctcgcgatgaccatattcccaaagatagccggagctacattatccggatgaccttcgatctcggtcgcgatgcgtaatttctcagcgtctgatagctggaggttagctaattggttggccaattcaatccctgcgacaatgaccgagctagaagaaccaagaccacgcgccaagggcacttcactagtcatcttgatccgatgaggctgcatatcagttgagatagaaagagatgttgagagcaagaggtttttctcatctgtcggaatccctgctcctagatcatgctcaatgaaccaagcatcagctggttcaaggacttcaatggtcaaatagcgagtcacggcaatcccaaccgaatcaaatcctggccctacattggcacttgttgctggaacaataattttcatgcttattctcccaagactttaaaggtattcaagagttcgaaattcgcctctgaatccaatttttcaaccaagttcttgaattgtgtttggttgacttggtgggtaatgatgacgacacttgcaaattgaccatctgagtcctcttgaaggatttgcttgaaggaagctccttctgcattaaagatttccgcaagacgcaagatttgaccagtcgcatctggtgccttgattgagaagtaataattgttcttcacgtcttctggcttagccaatttaagagggcggctgtattcattgaaggctttaccgattgttccttcttttagtcgacggacaatgcgaacgaggtcggctacgacacttgtcgcagttggtttttgaccagcacctggtccgtagtacatagactcaccaataccgatggattccacatagaccgcattcataacgtcgttcacgccagcaagtggatgttgttttggaaggaaggttggtgttacttctgctgcgatccctgattctgtttcaacgatagatccgaccagcttgataacatatccaaggctttgagcaaccgatacatcctgaggagtgatctggctgattcctttgtgacctacttggtcaaattggatgttcatcccaaaggcaaattggctcaagattaccatcttgtaggcagcatcgatcccttcgacgtcattggttggatcactttcagcgtaaccaagacgttgcgcttctgctaaagcatcctcataagtccagccttcttcgaccattttagtcatcatgaagttagaggttccattgaccacaccgagcactttggtcaccttgtcagaagcaagggaattgaccaaggtccgaaggattgggatcccaccagctacggcagcttcgtaataaagtgccactttgtgtttttgagcaatctctagcaactcgcttccatgaacggcaagaaggtctttgttagcagaaactacatgcttgcctgcttccagcgcacgggtgataaaggtcttagctggctcgatacgacccatcaattcgaccacgatggcaatgtccttgtcttcaatgatctcatcaacattggtcacaaagttgtagttgtgaccagcagcttgcaatttttccttttccgcatcatcacgaaccaagaccttagcgatctcgatttcatcttgagctgcctgggtgattttttcatggttttcttttaataaaaatggtacgccacttgcaacagtaccaaatcctagtaaggcaatcttaacagacatcctattgactccttgaattttctatagtagctccattataacaaaaacttgagcgtttgacagccaattgccttaaaaattctgaattttcatgacaggatctgcctgtagcaagttctggaaaagaacatagaatttgtggtacaataaagaaaataatgaaaacggtgacactatgagtaaacgaagagtacctaaaaaaatcaaagccctacttggaatcaatgccctcctcctagtctgtatctttatttgtagctttcttctgatcaaacggatcactcagccgagtgacgggaataccagtggcactgccgtaacgcgttctctcgaggaaggtagctcctctatcgagtggactcgtgtgaaaaagccggtcaaactgcccatcctcatgtaccactccgtgcacaatatggccgagtctgaagctgccaatgctaatttgatcgtcgatccagaaacctttgaaagccaactaaaggccctaaaaaaagcgggttactacaccctgacacctggggaagcctatcgcatcctcgtcaagaacgaagtacccaaaggaaagaaatatgtctggctgacctttgatgatggtgtcgaggatttctataccatcgtctatccgcttctcaaaaaatataagatgaccgccaccaacaatatcatcacggactttacccaaaagaaaaaagaaaatgtcctgacctttgaccaaatcaaagagatgaaaaatgctggcttgacctttgaaagtcatacagtcaatcatccagacctagccaattccagtcttgaaacccaaaagaatgagctagtcgcttctaaacgcctgctagataaggtgctggatcaaaatactagcgttatcgtctacccatccggtcgctacagtcaggtcacgatcgaccaagctaagaaagctgactacaaacttggcctcaccactaaaaatggactagccagctccgctgatggactctattccctcaaacgagttcggatccttccaaccactacaggagaggacctcctagccatgatccaagaataaagaaagagagtgggacagaaatcggtaattcgttagaattcgatttcgtcgtcccaccttcgcacagttgagtagggctgtaaaagctgatgaaatcagcgtagtagagcccactcaaccactgcgtcttgctcgacaatccaaaaataattgagaggctaggacttttgtcccagcctcttttgttagagttccttataaaaaatttttttaaatcgttgattcataaactgtaataggattcaaaaattcttaaaaagagcttcatcattgattcgctatagtcttcgactttcttttataaatgctcaaaacaattgcaaatgacaacaactgccaaagaataattctcactatctgcaagctatctgattcagaatttgaaacaacatgaaccagatttgaagcaagattgttgaaaagatgatctcctagtcctagccacaaggaacctgtcattttgtaaagtaaggaccatttgatgctcatcattcccgctaggataacatagccaatccccatggtaataagatttaagagtgaagattctccttgaagataatctctgaacggcattgccaagtgccatattccaaataggaaggctataaagaatagactcttgcggtaagaaatcccttcaagaatttttgtgaaaaggccacgaaaaactccttcttccatccacacgtttatcaggttaaataagacacttaacaagataaacaaaatacctgcttgtgttcctttttcatcagttaaagagaaaccactcgcataaaatgataagtgaacattgccatgaagaaacaagagaacaatacactcaactgtatatgcaaagatggagcatactaagccaaaaagcaggccatttcctatacctcttacaattccattaggtgtaaaaccaatatccatccatcttaatttgctaattgaaagaattccccacaaaaaaagtattccaaaaatcttgtgtagaaaattctccgataaaaaagtttcatctgtcctcatatagaagtattcgaatagccttgctactgaacagataacaaatataattgaacaacttaaaatagggcttttcaatagtctatttagcatatcttcctttcaaatgagtcttttataaaaattaatttcaatattttactcagtccaattatctattttccagatttcgagagaacgaatgaccctatttttttgacgacggctattacaactaagaccatcgcatacaataaaaacggaggaattaacagtaaagcgattttccagcctttgaaaaaagcgagtccttttgtggatttagttgatttagctggtttgacttctaccagcttcattcgcaataatttcaaagtgacttcttcttgtcttgcatcaagcgaaacactcttttctcctgagttttcactatctagataggcctgagccattcggaccagatacaatctctcatcttctttcgcaatggtacgaaatagctccattgccttatttctattccctttgagatattcattgactgccttcagatacatagattccaattgagagaacttgttgtttgtcacttcctttagaacagcatcattgggctcttttttgaccagtagatcatagcgagctctgtatgccatcttgagtggttcaacatctgctaaatagtcagagagcaattcctcgaactcatcttccttcaaatcaggtctagaaaataagtttgcattcaatagaatttcgtttaattttacttgttcaacatctgtaaacttttgaatctttttgagttcgtctacaactgcttcaatggatccaaaggcaccaatcctatagaaatagaaaatagtggcaacctgtacacgcgctttaatagttttgatactctttcttttttgattcagaatatagcttgccatcaagtcaagattgatatcctcgtagataagactatttaactttttgattaaaagaatatctttaatgataactagaatcagctcaatcattaagtaaatcaaaaaacaaatggtcgcaatacttttactttgggtcacctggactacatataaaaacggtaaggctagaatgaccaataggactatcactggaatattgtagcgttttcttaattctttataatcttttaccataaatctcctttgttgttattgagatatgacgtgtatcctatcaacctcatatcaaactcatttgattttgctttgagaagaactctgactgacaatcgtccaaatcagcaacacagttactagtactagtgttactagaacactttttcttttcatattgtttctaaccctttctagtctggatgattagcagaccaaacctgcaattcatcgtaggattttatttgtgttttctcaccactcttcggatctgtcgcatagacctctaatacatcctgcccctttggtgcaaaccaatgaagaactgtatcaaaccactctttggttgagtactggttaggtctcatatataaacgagctaaatcctttatatccttagccatttctggatagtcttgagcaaaattagtattggagatatctatcttttcacgatctctatttgcaataaatgtatcaatataaccagctgcaaaattcaaatggtatttttcctccattaatttacgtaagctgtcgaatactcctcccttacctaattcaagtcccttatatgaaaaattggtcttctgtaaatcaccaaatttatcaatattttcaactttctgatttgtaatatcaaccataatgtctttacttgcattatttccaactttatataaagttacaggtatataatccttgttatctgcataatactgattgatatcgtatgcgcctcgatactcttttttccctaataattgatatagttctgtctttttacttgggaagccagcagcattcaaatcataagaaataatattaaaatactcgtcttttgcaattttaggtgagccatttttctctctatcaatcatactttcattgatctgtttttgatggacatccaaaacagaaatataatcttgaccaaatgcaatacctcctaaaccatctttttgcgcaacaaatacaaatttattgtcatcaaaaagatgaattgtaggtttctcggttttcgcatcaatatatttctgcttggtttcttgctgactcgtttttccatgcttttgaacttgcttccacatgtagaaagagcctatacttactaaaaggactagcactcctactactttcttattcactcgtttcatttcaacctccacactcatagttaactcctaccatcataccgaaattttgcgactgaggcaacttccacactagttggaaatagttgcaagaaaaaaaccacctctaggtggttagtatatcaacaaactttttttcataaaacaacctaagtgatgccgaaggaaataaaataaactatactatgtggctcattcaaacatacactgaaactttccgccgtgagaaaagtgcctgaaacaataacgttacaggcactcggaattattgagaccttaggctcaataattagtcttggaacttcgaagaagttcgctgacgtccgtactcacctaaggaaagtttctaagagaagtttatcttgaagttgacacctctaggtggtgtttactttttcttttgtggaaagaggggtaggcctaacgtagcgatcttctcagcgggaatcttcatgccatccttgatccatttggagatgacagaaacaatggcggagctccagaaggaattgaggtagctgccagcgccattcgaggagccgccatttcgtttttctaaaaagtcatagactgccttggtcaagagtcgctcaaaattataatcaatggccaagctaatgattttggcttctttcttgacttccttaaagaggtagccccagacttggtagagatctgtcttgaggttgtagccatctaaagacttggtaatctttgcgatactagattgaaagatggactctagaatctcttctttggagtcataattacggtaaaaggctgcgcgagagacacccgcacgctgaaccagctcagagatagtgatctttttcagatcttttttctccagcaattgcaggagagagatttcgatggattctcgtgtaatcgcattgttttcttggttaaatcgtttgagattttccaatgatttctcagatatttttctttctgccataacatttactttctatctgtctcacctgatgatatctgcttggatagcattgctcttcatgatataattgtaaaagaagacaaactacttgtcaatgtacatttttatacaattatgaggtatgaactgatgaaatggaaaattattgcggattcaggctgtgactaccgctctttggacaatctggcaccggatacggagtttgtcagtgtcccattgaccatccaagtgggagagaccatctatacagatgacgcccaactcaatatcgatcagatgatggaagagatgtatgcgactacgacagcttctaagtctgcctgtccaagtcccgatgattatatgaagtcctttgaaggagctgaaaatatcgtcgttgtgaccatcactggaaccctttcaggtagctacaatagtgctgaggtggccaagaagatttatctggaagagtatccaaataccaatatccacgtcattaacagcttatcagctgggggtgaggtggacctaatcgttcgcaagctcaatcagttggtcgctgaaggcctcgattttgatcaagtggtcgatgtgatcacgacctaccagtctaagacgaagttgctctttgttttggccaaggttgataatctggtcaaaaatgggcgtctcagcaaattgatcggaactgttgtcggactcctcaatatccgtatggtcggcgaagctagtaagaccggtactcttgagttgcttcaaaaagctcgtggccaaaagaaagcgatcaaggcggcttttgatgaactaatcaaggcgggttatgctggcggtcatatcaccattgctcaccgcaacaatgaaaaatttatcgagcaattctctgcattggttcgagaaaaatttgcccatgcaatgattgaagtccttcctacttctggactttgtagtttctacgccgaagaaggcggtctcctcatgggctatgaaatttaagttaccactaaaaataggctaggacaaaagtcctagcctctcatttgtttttggattgtcgagcaagacgcagtggttgagtgggctctactgtgcgaaggtgggacgacgaaatcgaattctaacgaatgaccgatttctgtcccactctctttttttattctccgatctcttggtagagggtacggatttttttgcggtagatggtgtagctgatgcctgctccaattaacaggatgacactataaaggatcacagccagcagggtgctgacggaatgataggtccaaatgaagctgacaataatcaaaagaaacatcacaaagataaagacaatcaagagaatagactgaaggactgcattcccacgatgacgagtcatcaactccgtgatattggtccaattggtgctaaagttctgaaaatctttgacatagtctcgaatgcagatcggaatggtggttacgatccagatcagtaacatggcaaggatagccaagggatggacgccaaaatagagacaaacgccaactagaagaatgacaggaaggatggattgcaccagatagagcaaccaaaacttcatgaagagatagcgtttgaaatcaatagggagcgatctcaggtactcaaagttttcgcgctccagcgaaataccgatactggtcaaacctccaaaactgttgaaaacaccgatcaagatggcaacaagggtcagtggcaccagatactggggcgtcaggtaaggactgaggcctcctatatttttcgatgctcctgctgctccactgaggaggaaaatatatggcagaatgctcatcatcaaaaggacttgtaccataagggttccatcactcaggagtctgcgatgatactgaatgacaaatcgtctaaaggagtctttctgacccacatggagcactctcacgcgctctttaacggtttggttggtcgcaactgcaagggccgcatcatagaactgcgggatcacgattttgcgaaccaggccgatcaagaccaaaaggaccaggatccagcccaagaggccaaggatcgcttctccatcaaaaggatggagaatgaactgatgaaaggccgtaaaaggtggaaatagaatgggaatatcagcgccacccgtcacttctacccgatgggtttggactagattgagataaagataagctcctagactcagaagagatccaattccgaccatgatgttagagaccagggtcgtatgttttttgaaaaacaaggtcttggtgatcaaatgggataggatgatcgtcgctaaaaagaggacgcctaagagaattaaggaacaaaagaggcctaacaggatccctaacggattaaagccacctgcttggacaggcaggatcagaaaatagctgatcaagggaaggatagccatgaggagggtcaggatgaccgagatactctttccagcaatgacttccgcatctgagaaggcatagggccggtaaaactggaggtccttgctttcataaaatacattgtaaaagctcataaaaccttgggaaatggtcatcaaggaaaagagggcgaccatattgacaaagaaggctggttggttcacaaaatcatagatactaaagagcaagccaaatatgaggaaatagaccaggcctaaaaagagatagttgagcaccgatttacgggcaacattgagtttgacgtccggttttttggcctgtttggcacgtaattttgcgatctgagcaggctgactggcatagatgatattaacattgaccagctgctggatgatcttaagacgcatgatcgccaccttcttccttccgacccgctaggctgagatagatactttccagactttgttcgggatgttggcccttcaattcctcgatcgtcccatagaaaatgagatttccttttttgagaatggcgattttatcacagagttgttcggccacttctaagacatgggtagagaaaataaccgtcttgccgcgatccgcatgctggcgcatcatttgttttaaatcgtaagaagcctgtgggtccaaacctgtcatcggttcgtccaagacccagatatctggatctgacaagagggctgcaataacaaagaccttctggcgcatcccatgtgaaaaggattcaatcacttcataacggtggctctgaaaatcaaagatcctaagaagctcttccaagcgttggtcacagtctttctgactcatatcataagaggtcgcaaccaactcccagaattcattggctgtgaggcgcaagaaaagatctggcgaatctgccacataaccgatcttctttttgatcgcaagtcgatggctatagaggtcctgaccatccacttcaatggatccagtggttggggtgatgacactgaccaggctcttaatcgtcgttgactttccagctccgttgtggccaatcaagccgacaatttgcccgtcttcgatggtcagatccaagtggttgagggcaatatgcccatcgtaatctttggtaactccgtgaaatgtaatcatattaactcccttattggtcctcattggggcctttttttcttattctgttgataagcgatcatcgaaatggtagagcaaatctagcagatagtttggaatggtctccaagaagtcttctttgtagactcgctctcctcgcttatgcaattctttaccccaagggcctagattgaccgctggaacctgaatttgggcaattttttccagatccagatcatagatctgagctggtgtggctaggctatctaggacgacttgataagaggccacatccttttccaaggcacaataactggtgtcgttaatccccataaagtattcttcgacttttaagaggtagcccctttggtccagatactcgcggtaatcagtgatgaaggacacgatattgagatcggtattgtccaaaaagcggcagttcatggaaggataatatgggggcgcaaaaccgatgaccaccataggatccttatctccgagaaactcaaggagtcgctggatttgctgaatcgcaaggctctggtagctggtcccattacgaaaatcttgctccgcttttttattagaagcttctctaaagtcttggtaaccatctaaggcttggcaacgttcctctagttcttgataagtgatgactcttggccttgcaataatatggtcttggccagcttgatcctgcaagtgctcgtacttcttgtaaaaggcgtccaaggcctcctgactaagctcgtagattcgttgcaagagctcttggggtgttttcttcaaatgcaatacactgaaataaccagccgcatagagcacggtcgatacatcgtactgctccttcaaatctctgagataggaccaagaaggaaggggagacgtttctcccagcgcctgatctgccagatcgggatgaagatccagctggcttgcaacggctactaagagggacaaggcattgatccctttaaggggctccttcatatgagacaagacaccttgcgccacaacgactggcatgagtttgccgactgtgccaatgtgaaggaccttttcttttcctacttccgattcaaagggctctgaatccactgccaatgcataattcagatcaaacttttcctgcaaatctgtgaggagtcccaaggctccacgcattccacgtgaataggattcctcgtctccaacagagagatagagcagattgacctgaccttctgtggggtctgctgcataggcttccagaacccccaattgcagggccaaggctgctttcatatcgcaagagcctctgccaaatttccattctccagaagctaaatctgcctgcatatcgggtcgcctatccaatgttttcaaggcttctgctacttgatcagaatcgagcgcgatctccgacaaatttccatagtcttctaaatcgactgtatcatggtggtggaaaaggataactgtttttttcttgcccttatcgaccaaggcccaattgaccgaccgatgcaagtgatcctgaggcacctgatagcgcccaaagtggtccggatgttccttgaaataggggatctggccaatccgttgatccaggtaagcttcgattccttgctcggtctccgtgttggtgaagcttggaatcgccaaggcttcggtaaaaatcgtttcgatgctctctctattggtggttttcactttctctccatccttttttctattattcatctttgtgagctttgccaagtgacaagaggctggtgagcatgagtcctaggaagccaaagagagtccaagggcttgttgcttgacctgtttttggaaggctcggttggcttgtcgcttcgatcttatctttatcagctctttgagccaattcttgtgcagtttcttctttttgttccttacggaagtccatcggatcccgaccatggcttggtttttgagggatttcagaagcagctggattagttggcgtcattggattacttggaacaattggtttttctgcttgatctactggacttgggtcttgttcaggatctacttttggttgaatggttgcaattggcaagatccgatctgccaatgtggcatactctgtatctttttcgctcggttgataacggaacaagagagaccgactgttttctacgattggaatcgttgcagaaatagaatctgtcttgaaggtcacttcataaggatctgcaaaatagatgtaatccggatcataggtgtgcaaactcaaaaccagtcgatggccttttttcactgtatagagatttggttgcagatacatggtgtaatcatgatattcattttctttcagatcaatagaatgactagaacttgctgagtcatagcgagatgctggattggccagattcatccaaccacgcgcaatcaccacactcttaaccttgtgggtcttgtaacgtttgagaggcaaggtttcaaggttgctaccattccagtagcctgtctcatcgatggtttctttttccaatgtgcgcgtgctgtagccatctttatcataggtgatttcttccttgaccacatcaaattcctcatcggaaacatccatcagagtcgcactgacatgggcatggttcttgtctcccttgacaaaagctgcgctaaaatgcaccggaatatgacctttgatggtcgtatcttggtcgacggtggctgcataggaagctgccacttcggaagaatggaaggctgcatcttggttacgtgtagtccagttatttcctgtaccatagtaatcgccagttactgtcacatcctcccgtttagagtagattcgagcggagatggcattgttggtatcccatttatcaaaacgacgccatttacttggatctagattgtcctgagctgttacttgtggaaggttttcaatcccattttcaataccgtagaggtaatggctataccagagattcatcaggtcattaaaggcttggcctgcgacttctgtccctgaccaacgagtagatggatagatgtgattgccctggtggagcaagaccttgggatcaatccccgccttcttataggcttccagcatgagttcaaaatgttttggtttgacattgtcatcattgagcccttggataatgagaggggccgcctttaagttgcttgcatttaaggtgtagtcgcgtttggcatattcttcgttgtaattatgaccatccttgtgttggagctcattgagtttggtgatataggctgcatagtaatccttgaccttgtcccaatcttccttatcaaggattcggcctgaggtatagacagacagccaagataggtcattggaagctccggtatcaagaggagatccttggctgttgaaatggtcataccaactagcaatccctgcagctggcacaatggtctttaggccttccacaccagtagaagctacaccaaatgttgtcgtacctgcccaagataagcctgtcatggcgacgtttccgttggaccagtccgccttgacttcctggttgctagtcttatctgagtaagctttgcgtttgccattgagccactcaacgatatttttataagcagcgacttcaaggtcagagccggtcgtattgatcccgtctgatcctttagagcccaaaccactactggtcaccactgcataaccacgaactaagaaataattgtaccagttgagattttcgtaatcataatgcgtataatcttcagagctttcacgcggattgacatagtaccaatcctttggatcggtcgcttttgctacttcttctgtcgtaacagtcttggttgcttggcgtttggcaggtttttcatagagcttggccatatcgaagtttccaccttctttgagaccaattccctctaaggtgcgctcctctgttgttcctgttacataaggactagcttcaaagatggacgcagctttatagttcccattgacagctgcttttggcacctgcacaaaggtcttgatcaagtcaggcttgccgtctccatccgtatcataatcggtttccacatagacaatatagcggacgatgtcactcttgtcataggagtaatgctccggatcgtcccctggcgtaaatgggaaaataggttgtgctttgccattcaaaaagagaggtgacttcttgtctgcgcggtaagcggcacggagctgtttggctacatcaaccattgaagtgagattagtaactggagcagatccctccactccttccttgaccatccctaggctcttggcaaaagctaatcggtctttatcagtagatccgacttgattttccttggttgaagcccagttcaatagttgattgactgcctccgtcacagtgacttctttttcacgatcctggtcggttacagttgcaccagtaatttcagccaagtctccttgggttacttttggagtcgcgctctcctcttgactgccaacggtaggcgtcgcaggcacagggcttggctgattggttagagtggactcaacagttggggcgctcactaccgctgggcttgacgcaggttcttcatgtagctcagttgtcggagcggttggtgaagtggttggtctgtttgattctgaaacctcttctactttctcaggctgtacggtttctttgttgtctccttgtgttgaggtcactgtttcagtaacttcagagcttgtcgctgaaggagtcaccgtctcttcagtagttgtgctgcttacttggtctgcttgcacatgctgggcgagtacagcaggactaatcagtaaacctgcaacaagtagagaaacaagagttgtttttttcataaaatggtctcctttcaccattttcaaagtcagtcctagcggaacccgactctatttttttatattctcacttcatttctttcatgtatgcgatttcttttctagaaagggcttgcttccagtgcaaacgtttgtcgcatccaactatttttggtaaaataggaacattcacatgaaagaagaaataacaatggaaaatcaaaccttaatgcaatattttgagtggtacctgccagctgatggcaaccactggacgcgtcttgtagaagatgcgcaacacttagcagacttgggtatttgtaaagtctggatgccacctgcctttaaagctacttccaacaatgacgttggttacggtgtctatgacctctttgatttgggcgagttcgaccaaaaaggaacagttcgtaccaaatatggcttcaaagacgattatcttcaagctattcaagccctcaaagatgctgggattcaaccaatggccgatgtcgttctcaaccataaagctgctgctgatggcttagaggaattcgaggtcgttgaggtcgatcctatggatcgaaacaaggttctcactgagcccttcaccattcaaggatggactaaattcacctttgatggccgaaatggcgcctataatgacttccactggcattggtaccacttcaccggtacggactacgatgcttcacgtaataagaatgggatctaccaaatccaaggggacaacaaaggttgggctcatggagatctggtagacaatgagaatggaaactacgattacctcatgtatgccgatatcgatttcaaacatcccgaggttgtagagaatctcgaccaatgggctgactggtttatcgaaacgactggtgtagaaggtttccgtctggatgcggtcaaacacatcgactccttctttatgaagaatttcatccacaatattacccaaaagtatggtgaagatttctacgtctttgctgaattttggaatggcgacacagaaactaacgatgagtacttggaaagcattgattacctgtatgacctggtcgacgtagccctccaccaaaacctctttagagctagtcaagagggtgaaaatttcgaccttcgaactatttttgatggaacactggcgctgaatcatcctgaagaggccgtaacctttgtggaaaaccatgatacccaacgagggcaagccttggaatctaccattgaagaatggttcaagcctgcagcctatgccttgatcttacttcgtgaagctggtttgccttgtgtcttctatggagactactacggtatcgagggcaagtttgcgcaagaaagtttccaagaggtcctcgatcgcctcttatgggttcgtaaagatctggcctacggggaacaaacagactacttcgatgatcctaattgcatcggttggacacgctcaggtactgaagaatcagcaccaatcgcctgcttgatttccaataaccaagctgctacaaaagtcatggagatcggctcatcctacgcaggtctcacctactatgatatcttagaaaattgtagcgaaaccgtccaagttcaagaagacggtagcgccgaatttccagtggcagagcgctccgtcagcgtctgggtagcccaagatacagagggccaataacctttatatgtaatgttctcctaggatcgacatcttcctaggagaattttttcctgtaaaaattttataggaaatacagattcattttagcactataagaaagcgctgtcaatgggtatcacgcctatttgaaagaaataaagagtatcaaaaaaactcgttttccagtttggaaaacgagttttttttagctcaattctgcaatgatttctttcaattgggctttcgtatgaactccagccacttgtttgacaacttgtccatcttttttaaagagaagagttggaatcgacatgataccgaattgacgcgctgtatttggattttcatcgacatccatcttacagattttcaaatcatcttcatgtacttcttctgccaactgatccaagattggagcttgcatgcggcatggaccgcaccaagttgcccaaaagtcaatcaagacaaggccttggctggtttcttgttcaaaagttgcatctgtgattacgtgtgccatatttcctcctttttcagtagtgactactgattctgcatttctacttttattttacactaaatgatgccattttagaaatatttgctacggggactccttaggcatcttctctctttttgtgccaaaagatgaggctagaagctgttaggctgatcacacctaagagacccagagcatggtctttgctccctgtttgaggaagggtatggtctacctgctctcctcctactgcagaagtcgcaacttgaggatcttctgccaatccttgtgaaacaaattgaggtccataagatacagctagtgtaagatgagattgctcttgtcttgctgatgctgtttgcatctgttcatctttttcaggaagagtttggcttggttggacaaagtattctgggcttggcagtgtatactcttccttgtagtgtacttctggagcaactagagcagctccttttatttctggcaatttcgcatagtcagtatctgttgcactcggtacataggctgccttttgggcgcgggtcttttcaacaattggaatcgcagcctggatagaatctgtcttgaaggtcacttcatatggatgctccaccgttaaatcagacgggtcataggtgttaaagactagagctaacttgtgacctttcttaaccgtatagagatttggttggagataaaccgtgtaatcgtggtattccccaacctttggctcgatgcttgcgcgagagcttgctgaatcgtagccagacttaggattcgcaaggttgatccagccttttgcgatcaccttgtacttggtcttgatggtttcgtattcggcaacagataggttgcttaaattgcttcccatccagaaaccgtctgctgttttatcttgcttgacgctaccatttcctaccacgtcaaaatcctcatctgccacatctaccaagagagcgttgatttggaaattctttccttgacccttggcaagagctgccttgaaacgaacggggatgtggcccttgatcgtagtgtcctcagtaacatcagaaacgaaggtcagattggccttagaggaggctttgctgactgtttcattacggttagcgatctcaacacctgcagccgcataatcgctagaaatggtttcttctagccgtttcgagcttgcattcaagaagagacgttgactgctcttccagttatcatagctggtccacttgcttggatcatagttgttttgagctagaaccgctggcaagctttcgacgtgattgtccactccgtagaggtaatgggtcagccaggtattgagcaggtcataaaagtcctgaccattggcagtgatgccgtatccccgtgacatagccgctgggtagacgtgatctccttggtggagatagagcttaacatcttggcctgctttcttgagggcatcgtacatgagttcaaagtgtttggtcttaacattgtcatcattcaagccatggacgatcagggcgctggtcttgagattttccggatgaagggtataatcccgctccttccagtcatcactgtagttacgatcatgagcgtactggtccttattcaattggttgatgtagttagaatagttttgccaaatacctgcccagtcgtcttggtccagcattcgcgtgctaacgtagagggagagccatgaaaggtcactataaggtgcattgccaaactgggttccttggctattgaaataatcataccaagaggcaattcctgctgccggaacgatggtctttaggccttctacgcctgtcgctgccacaccaaaggtcgtagttccagcccaggatagaccggtcattgcaacattacccgttgcccagtctgccttgatttcgacattgctagtcttatcagtgtaggctttgcgtttgccattgacccattcgatgatattcttgaaggcattgatttcgagatcagaccccgtcgtgttaaatccttctgatcccttggtaccaagtccggcactcgagataaaggcatagcctctgaccaagaaataatcgtaccagttcagatcttcgtagtcatagatatactcgtagggactgtagtaataccaatccgatgccttggcttttttcgctgcttctactgttgtttcactgcttactggctgtctctttgcaggttggctgtgcagtttcttcatgtcgtagctaccatccgttggaagccccagactttcaagggtcacgtagttttcatcaagcgtccccgctacgtaagggcgcgcttccagaatagtggctgccttaaaatcaccttgcgctactgcttttggtagttgaacaatggctttgactaagtcaggcttgccatctgcgtcggtgtcgtagtccgtttcgacatagacagggaagcgtacaatttggctgtcttcatatttgtagtcttggtctgctttttctcccgtcgtataagggaaaatcggctgggcacgaccatttaaaaagagcgggcttttcttttcagcccggtaggcatcgtagagtttcttagctgtttcatacatcttggccaattctggctgactaaccttacgagtcaaatcttctgatttttcaatcaagcctaaactcttggcaaagcgttcgcgatctgcttggctttggcccaattggctaggatctgttgctgcccattgaagcaagccattaacagcatcttggaccgtcaactctttaggggcctgatcagctgcaagggtgctacctgtaacctttgctaaatcattacttgttgccggagcttctgaactgggagcagattgaggcccagcttccctgttggttgttgctggacttgctactgggaccgtaggctcactttgtcttgtgtgttcttctgtagcaggggctacttgatttgcaactgtcgtccgatccagcgatgcctcactcaagctcgctccttcttcactagagctagtacttgtgtcacgtgctgtcggtcttgcttcagtagatggagcatggaccacttctgtcgatggagctaactcttctgtctgctcatctgctgctgctacttgatgcaagaccatcggtgcgatcaataaacttgatgcgacaatggaaaccattgttttctttttcatgtcagtctcctaactttttgtaatcaacactcccattatactatgtaagcgttttaagatcaaacagatattcatctgatccacaaaaaaaccgaggcatcagcctcggttatcgatccttatttaacgtgtttcttaagatcttcttgtgcttttttatttgactctgcttgttctttttgccatttttcaagggctttgttgtaatcagcacttgtcacagctttgtcttggagtttcattcctttgtagatcacgtggtcttttcctttaccaccagtccatgcaaatggagctgagaatggttcgatacgtgtcaagaatggacgtccagttgatgaagaagttggcataacaagggcgctatcagtcaaccaagcttgcgcagccgcatatttttcatagcgtttgttgacgtcttgtgtttctgcaccagcatctttgatcatcttttcaaagtcgtacagaccaacttttttagctgcttcattgttttcacttgggtcaaatccaaggaaagtcttagtattttcaccagatgaagctttcaagatatccatgtaagttgatgggtcttggtagtcagggctccatccaacattatcagagagatcccagtcttcgccagccgcatttggtgcaaagagggtcacattttgaaggtcttctttcgaaagcatttggatatcgatgacgacattttctttaccaagcgcttcttcaactgattgtttgaaagattgcacccgttgaactcttgatggagtggtttggtccacaggcatatcgatgtgaattgggaatttcacaccatctgcttccaaggcagtcttcgcttttgcaaactcttccttcgctttcttcgcatcgaagagaccgttttgaccatcatctagtttagtagatttccactcatctccataggtatccaattgtgttttcaccatttcaccgaaggtcttgccatcagcttggacaaatgttggtggaatgtagaggttacggatgatcttgcttgctccgtcttttccgttcaattgagcagcataagcttcacgattgaaggcaaagctgatcgcttgacggaagtccttgttcaagagggctttcttagtagattgtttttcttcatcggtcctcttagctgtgtgtttgtaagattgacggtcgatgttggtaccaataacataagaagcggcgtcttgaggagtgtaggtgatttcgtctttgaattctttggcttgctctgagtaaccagatccagttgggaagagtttggccaagctaagagcattttctccgaatgatttagccaatttactttggtcttgtccatcgtagaattccaatttcacatctgagatgtagaccttatctttatcccagtagttttcattcttggtcatttcgatagaagattttgaagtaaagctcttcaagatgtaaggaccattgtaaagaagggagctggtgtcacttgcttgagcgaatttatccccttttgatttcacgaatttttcgttgacagggaaagtgatcccaagagtcaatttagagttccagtaagattctggttggttcaaagtgatttgaagggtatgatcatcaactgcttttactcctacagctgagaaatctttatttttaccactgacgtagtcattcaagcctttgatagaatcttggatgatgtagagcatttctgatttgttatcagccgcatatttgatccctgtgacgaaatctttagctgttacatccgcatactcttcaccttctgaatcataccatttagcatcatcacgaagtttataagtataagtcaagccatcttgggaaactgtccagtcttttgcaagagatggaatcaagttaccgtatttgtcattttcaaacaaaccatcaatcaagtttccagtgatatcgtgggttgctgctttaccagatgtgatatagtttaggttttctggctcagtctcatagacatatgagaatttttgaccgttgcttgagctagatgatttagaaccacccgaacaagcagctaggatacctgctgaaaggagggcaactcccgcaagtgcaatgacatttctttttttcatgtaaaactccttaagaaattttaagtttattttaagattataccacaaagattttcagaagaaaaggaattttcagaaaattttagttttagtttaagaaaaaactactccggagagtagttccatttttaatctactaagttgctcttgaggtaggcatcgaccatgcgctctgttgcgactacagaatccaagtgggtccgctcatatgagtggctagattcgattcctgccccgagaagagcgtgtttgacttctgctccagcactcatggctgcagaggcatctgatccatagaaaggatagatatccaacttataagggatttcttgggcttttgcaagagctaccaaatgctgacggaattcgtagtgatacggtccagaagcgtctttgacacagatggataccgtgtattcatctgtcgcttggtcatctcccatagctcccatgtccactgccaagtattcgaccacttcagctggaatactagaattagccccatgccccacttcttcaaagactgaaaaggcaaaggtggtcgttactggcagttggatctgctcttccttgtacacgcgcagaagattcaagagaatcgctgcactcaccttgtcatctaagtgacgagatttgataaagccggtgtctgttacaattgtccgtggatcaaagctgacaaagtcccccacttcaataccaagggcacgggtttctttttcgttggtcactttttcatccaaacggacttccatattatcctgggtccgctcgacagttcccgcatccttgtagacgtggcaagaagtctgatggaccaaaattgtccccgaatgggtctttcctgtattggctacatggactgtacaattttccccttcaatcatattccaagggaaaccaccgatacggtctagcttgagccgaccatctgctttcacagcgcggacaatagcccccaaggtgtccacatgggctgtgacgtagcgttgcttgtttgtgatcacaccaggaacggtcacattcacgcctcccttagcagtccgagttacctcatacccaaagccttcaatggttttgaccaaatagtctgcgatctcacgtgtaaaaccggtcggtgaaggaatggctgtcaattcctgcaaataagtcactgtctgattcataatgcctccaaatgtgtttttctttattctagcatgaaataggtggaatagctagaggagagattacaggttagcgtttttcaactcttcccgtacttgcattaggagaaagccagagttctatttatattttcaacacattttgggagagattcatctagtgcacctaaagaaacttgtccacaactaacggtgtctaaacaagttccacgcaggctatttcaatggtgaaacataattatcaggataaaatatgatgtaatttttgacaatatctgttagactatcttcagttatgtttctccacttatggagatagaaggtttcagacttgagaacagagtgaaaccattcgatacagccattatctgctatttcgcctcttttctgagaattcttacactcctgtttccagcgataaaggtggagcgtttgacgccgaaacattctaaaataatagatacagcgcacgttttcttatactcttctactagcttgataagacttactttgtcgattctcttatcaagctctgatacttttttagtaattctacctgcaaacgtaactgttccacttcagataactgtttcatcccattaccataagtatattgtttccccacgggttggtggaaacggtacaattcatcattctgataccatcgcaaccagttcttggcctgactagcatttttgatactgagggtatccatgataactttatttgatttgcctgccttcttcatttcgatacaggctaacttagtttctaccgaatatgcttttttgaccataacaaaacactcctgtttctagtttaccagatttcaacaggagtgttttcttgtgtctcattttatgggtgcagtgccgaccctagggattctttcgttctcatatatacgtcattagtataggctaatttgatttaaattccaagagaaataacattttacataaaaatcagtgggtattttacaatttttccatataatatagctaaaaaacaactggttttaagaattcttatctgaaacattcggaaatttcccttaaccgtagcggaaagttgttttcttctcctatttataatagactatcactaacattagatgaaaaggtgactctatgactataaatcaactgcttcaaaagctggagcctactagccctatccttcaagctaactttggaattgaacgcgaaagtcttcgtgtcgatagacagggaaaattagcacatacgcctcacccttcctgcctaggagctcgaagtttccacccttatattcaaacagatttttgtgagtttcagatggaactcatcacaccagttgctaaatctaccactgaggctcgtcgatttcttggagccattaccgatgtagctggacgttccatcagtaaagatgaacttctctggcccttgtccatgcctcctcgtatcaacgcccaagaaatccaagttgcccaactggaaaatgaatttgaacgccattatcgtaactacctggccgaaaaatacggaactaaactacaagctatctcaggtatccactataatatggaactagggaaagatttggttgaagccctattccaagaaagtgaccagattgatataattgctttcaaaaacgccctctatcttaagctggctcaaaactacttgcgctaccgttgggtgattacctatctttttggggctgcacctattgctgagcaaggattcttcgaccaagaagttccagaacctgtgcgttccttccgtaacagtgaccacggctatgtcaataaggaagaaatacaagtatcttttgcaagcctagaagactatgtctctgccatcgaaaactatatcgaacaaggtgatttgattgcggaaaaggaattttactcggctgttcgtttccgtggacaaaaagttaatcgctccttccttgacaagggaatcacctacctagaattccgtaacttcgacctcaacccctttgagcgtatcggtattagccaaactaccatggataccgtacacctactccttctagccttcctctggctggatgcccctgaaaatgttgatcaggctctggctcaaggtcacgcgctgaatgaaaaaattgccctctctcatcctttagaacctctaccttctgaagctgaaactcagaacattacgacagctctagaccaactggtgcaacattttgggcttggtgactatcatcaagggctggtcaaacaagttaaagatgcctttgcagattccagtcagacactagctgctcaacttcttcctcatatcaaagacaagtccctttctgactttgcccttgacaaggcgcttgcctatcatgattacgactggactgcccactatgcccttaagggttatgaggagatggaactttctacccagatgctgctctttgatgccattcaaaaagggcttcattttgaaatcctagatgagcaggatcaattccttaaactctggcataaagatcatgttgagtacgtcaaaaatggtaacatgacctcaaaagacaactatgtagttcctcttgccatggctaataaaaccgtgaccaaaaaaatcctggctgatgctggcttccctgtccctgccggcgacgaatttaccagtctagaacaaggtctagcctactatcctcttatcaagggcaagcaaattgtggttaaaccaaaatcaaccaacttcggtctgggcatttccattttccaagagcctgccagccttgataactataagaaagctctcgagattgcctttgcagaagatacagctgttcttgttgaagaatttatcccaggaaccgaataccgtttcttcattctggacgggcgttgtgagtctgtcctccttcgtgtcgctgctaatgttgtcggtgatggcaaacacaccattcgtgaattagtcgctcagaaaaatgccaatccattgcgaggccgtgaccaccgctcacctctggaaatcattaagctaggagacatcgaacaattgatgttgactcagcaaggttatgcacctgatgatattctcccagaagggaaaaaggtcaatctccgccgtaactccaacatttctacgggtggtgactctattgatgtcactgagacaatagattcctcttaccaagaattggcagcagctatggcaactagcatgggggcctgggcttgcggggttgacctcatcattccagataaaactcagcctgctagcaaggaaaaacctcatttcacttgtatcgagctcaacttcaatcccgctatgtatattcacacctattgtgctgaaggtcctggacaagctatcactccaaaaattctagacaagctttttccagaagttgccacaagtcaaacctaaaacctaattcttaggaacaaacaaatcacctttatctcgatgatatgatacctcttaagtagacaaggtaaatacctaaaatctacagctctttgtcaactttagtgggttgaagaaaagctaagctcgagaaaggacaaatttcgtcctttcttttttgatattcagagcgatgaaaattcgcttcttgaagttttcaaagttccgaaaaccaaaggcattgcgtttgataagtttgatgagattattagtcgcttccaattttgcgttggaataggataactgaaggtcattgatgattttccctttgtcctttagaaatgttttaaagacagtctgaaaaagagaatgaaccttctttatattgtcttcaatgagtccaaaaaatttctctggttccttattctgaaggtgaaaaagcaagagctgatagagattatagtggtatttcaagtcttctgaatagctcaaaagcttgtctaggatttctttattgcctaaattgtcaaattaagttagacttttcaagtaactcagaaaaacttggtagggtgattgaaatagttctaatggtaattcatagactaccctctgttcagctattcctccttcatctgtaacaaaaaaatatttctcatgatgtcgccaaacatgttgtccataaccttttatttcttcaaacttactaacgtcttcccattctaggtttgttggtttcattttattcctcttttacttaagtggcgatacataatcatctggaagttttcctctccagtcaatccacatttgctcagcaatcggaattaatcttttaagctcttcctgagtaaataattctctagtttcaggtatatcaattaatgatgtgggactctcttctattaaatcctattctaccaaaatatgcccatgaattcatactaaaacaaaaaagagcagcaaactgagctgctctccattttgtttatttttcgaccataccacccttgataagactgtctttcgttactgaataactaactgttttgtcatctaggggattaaagcctggtacgatttcttttaatttattaaaatcgatttttgtgtaatcaatggtattgcggatataaaagattccgtctttgtattctgatgttagttcaaatccatggcccatcagatctttgaatttttcttggctcttggcaacagcttctttcatggtttcaagagggttctcaccaggcacttttgagacgtcgtaatcatcaactttttcttgtaataacaaggtatctcccttgtaatacaaggtaatagttgacttacctgcttcatcactcgtttcgagaacagttttttgtgcacctgctagcgcatcttcttttttgctttcatcagttgatgactcttttgtcttttctttagcggatgatttgcttgttgctttactagttgctttagtagacgatggactagtagattttgtactctctttttgtgtgcaaccagctaaaagaagacccgctgccaagaagacggctaacatttttgtggttttattcattttgaatacctcacttttgatgatggttagggaaatgactgacgtctgaaatgagtcatttggcaagatcaactgtcgttttagatgttattaaaaaagtctcaaaaatgatgttcgcagtccctccttatcgatcattgtagccatctgggtggctggaatgccaagcccaggctgtttggatgatggtttcgatattgtcaaattttggttgccaaccgagaatagcacgcgccttctcagatgatgcgatcaaggtatctggatctcctggtctacgatcagcaatctcaagtggaatcggatgccccgtcaccttgcgggctgcttcaacgatttggagattggagaatccagttgatgagcccagattaaaggcggtcgattcatttccttttctgagatactccaccgctagcagatgggcatctgccaaatcaaatggatggacatagtcccgaacattggttccatctggtgtattgtagtcatctccaaaaatggcgatcttttcgcgtttgccttgggccacttgcaagacgattggcaggagatgagtctctggcccatggtcttcgccgatggatccatctggcttagcacctgctacattaaagtaacgaagaggcacatacttgatgccgtaggcttgatcggcccaacgcatgatggtttccatcatgagcttgctttccccgtatggattaatcggattttgtggagtggtttcaagaatcggaatttcttctggaatgccgtaggtagcagcagttgaagaaaagacgatgtagtgcaccccacattcatgcatgacttccaagagtttgaccatgcctgctgtattattgtcgaaatatttcaatggatcggccatggactccgcgaccagtgagtaggccgcaaagtggatgaccgcatcgatatcggcatgttccttaaaaacagtgcgcataaagtcttgatccgccaggtctccttggtaaaagacggcatcttgatgcaccgctgcacgatggcctgtgaccaggctatcgaccacgacgactttttcctgtccttcattgaccaagcggtccaccatgtgggaaccgatatagccagctcctccgagtacgagtattgccatttgttttcctttcgcttcttgtcttctctcttattgtaccaaatttctgtcgcttctccacacttaaagtgtcgcaacaaagcgtctaaaggcagcttgtccttctgctgttcgcttgtagactccagcatcttccagcacgcgcgcaaagatctgaccaaccgattcacggacaagggcctctgcctctgcttcttctgtgatagctgggtgagtggctttcaaatcatctgcccaaggctggtggtaggtcgccacagtattctcacgtccaatcaaatagtcttgaacctgcttgagctcttccttgaggcgaggtggcaaaatggccaagcccatgacttcgatcaggccgatattttcttttttgatgtgttgcacatccgcatgtgggtgataaatgccatctggatgctctggtgaggtttggttgtcacggagcaccaagtccaattcataatgcccatcacgaatccgtgcaatgggggtaatggtatggtggggctgaccgtcggatgctgctaagacttgaacggctggatccgagtagcctcgccaggctgtgaggatatggtctgccaggtcaatcaattgcgccttgttgtccgattgcaagcggagaaccgacatgggccaattgacaattcctaccgatacagcctcaaatccctcaacgctaaagctttcctcaacaggagctagctccatagggaaggtatggcgtccgccttggtaatggtcatgagtcaggatggatccccctacaatgggcaggtctgcattggaccctgcaaaatagcctgggaaagtctcgacaatggtcaagagtcgctcaaaggtcttgcgactaatggccatgggcacatgctggctatcgaggaaaatgcagtgttcattgaagtaggcataaggggaatactgaaagccccaatcatgaccgtccatatcaaagcgaataatcctgtgattagcccgggctggatggtctaggcgaccttgatagccttcattttcaaagcacaattggcaggccggataatgactggctttggcaagcttggccgctgcaatgtctttaggatctttttcaggttttgacagattgatggtgatttcaagagaaccatagggagtttctgcctcaaaggcaatattttgcgcaatcgctttgaccttgatgtaatcattgcgcttagagagggcatagaaatccgcaatcgcgtcttctttggactgacgataggtctcccagaaacgatggttgacctgactaggactaggggtgatccaatccatcaactccgcacccaagctgtcctttgcggccatgctatcttggatcttactattcgcaacagcgatttccaccagctgatctttgagtgcgatcaagtcagcctgatgagctggggcgtctagaccttcttctccaacgcgactcatgatgcgattttttagataaatccgatccatctcttcgtagtcactcgccacaatgacggctgtaacaaatgcatctaatacctgttctgtcatcctatctcctttttaatcgattacccgtgtccctgccgcaacttctgcgatatagaagcttggcgcatagccaacgacttcttcataacggttgccgacagtttcttcaaatgcttcaaccttatctttgtttacaagggcgatggcgcaaccaccaaagcctgctcctgtcatacgagcgcccaagacaccttcttgttcccaggctgtatgcaccaaggtatccaattctagacctgtcacttcgtagtcatgctccaaggatacgtgggaagcattcatgagacgaccaaaacctcccaaatcacctgcttcaagtgccttacgagcttggagagtccgttggttttcaagtacagcatgacgagctcgtttgatgcgattttcatccttgatcaagtagctataggcatcaaaagaccagatatccaattcccctaaggtttggatatccaatttttcttggagttcagagacggcggtctcacattctgaacgacgttcattgtattttgaatccgctaattcccggcgtttgttggtattcatgataactacgacattgtctttgaggtccagcggtaccagatcatactctagggtgttggtatcgagataaatagcccgttgatcagctcccataccgatggcaaattggtccatgatcccagagttgactccgatgaagtgattttcagtttgtttcccgatcttgaccagatctagacgatctaactgaagatcatatagtttctcagcgatgacgccaatcaagagctcaagcgaagctgaagaagaaagaccggatccgtttggaatattgccgtagacatagacgtccattccgctatcaatgacatgacccgcttcttgcaagaagtggagcacgccttttggatagttggtccagttatgctctttttcaaagtggagattatccagtggaacttcaatgatccccttgtcttcaaagtttcctgagaagaaacgcaagaccttatcctcacgctttcttgcagctccgtaggtaccaagtgtaatggctgctgggaagacatgcccaccattatagtccgtgtgttcaccgatcagattaatccgtcctggtgaaaagaaagtgtggtcagccttttccccaaagacagcctggaattttgcttgtaaatcttgagatgtgattgttgtcgtcatgagaaactcctttagttttgtaaacgtttttatacttgtattatatctgatcgcaagtaaaacttcaagtatttttagtaaaattttattaattttttattttatgccaaagaaggctataacaaagggttttcctccgattaaaacttctattcgataattgccgacttgagttaattttagtaaaactttaccaaaaaatctcaattgggagtgacccaattgagattctgaatcctttagtgtttctttcttggatagacaaaagatccaaggaaggttaagaggctgatgcccatgagagctaggagattctctgtttgaccagtttttggcaatacagatgatgcaggacttgctgacacgctgacaggagcctgatcagtggcttgtttcacagcgatcggagtaacttgtggacgatcaagagtgctagctttttcctgcttgctaacaagaacctgtgttccagtgtgaccaacctctactggttgtgtctgatgggttggatcttggactggtgaagttggatcttgggtttctggtgttggcaatggtgcaggtgctggatagaagagaccatgaccaatgcggtaggcgtactctgtttccgacatttttccgtctacaatttttggaatatcaaccggtaaggtacctagatgttccttgccattgaagatgacttccactcctgcaggaatattaggaccaaatgcattgtctggtttgagggattccgttggatccattcccttatttccatagactgccaaaatggcttttgccgctggatagttggctacatcataaggtttagagatagaaaggacagctgccttcttatggttggtattggcataattgacgatttctgttgggatcttggtccgccagaaatctttatccagttgcccttcataaccgatctctgaaatcactacgatgtgagtggctttctctaggtcttcttttagactatcaagggtagattctttagtgaagttcttggccacaaaggaggtatcttttggaagcactccgtccgcaattaagcgacgcatacccaaatcgagtccagggacttcattttcaaaagctcctaagagtaagacatggtcccctgtttgcaccttaaatggcagagtattttcttcattttttacaaccgtcaccgctgctgctgcaatcttgcgttccaagtcacggttgagggttgatccgactgcttcttctgctttttcagccgtccgagcacttggatcaaaattcaagaccccacgtttttctttgagggtcagaatccggcgaaccgactcatttaagcgttcttctgaaatgtcaccggttttcacggcatctaccactgcatcgacaatggtatcaatcttgctcaaatcggctttactgcgaagggtcgttggcatcaagaccaggtcaactcctgctttgatggccattttcacagcttccacctcaccgaagttcttggcgatggcatccatccccatggcatcggagacaatcacgcccttatagccgtatttcttccttaccaagcccgttaaaatatcatcagaaagagtcgctggaacataaatcttctcgcctgtttcttttgaaacgacctgatctttttcaatctgcgggtattggatatgagccgtcatcaagaggtcgacccctccatccatagcttttttgaatggaaggagttctaatttttcaagctcggcaagtgatttatccaccaatggcagacctgtatgggaatcgaccgctgtatctccatgacctgggaaatgcttggctgctacagccacattgtagtcctgaatgcctttcatcatcggaatacccaagtaagcaactcggtttgggtcagatgagaaggaacgaagcccaatcacagggttttgaggattattattggtatccaaaaccggagcgaagtccacattcaagcctagtgcagaaagttcacgtccgatgatttgaccggcttctttcgctagtttgggatcattggtagccccaatggccatattgccaggaagggcagtacccgtacccaagcggtagacgatccccccttcttggtcgatggctaacaatagcggaatcttcccgttattggccttgttttcgatcgccgccttttgcatatcttgcgtcagagtcagggtttgcttggtttctttcacgttttcagcaaaaagaatgacgcctccaaaatcatatttatcgatcgcatctgctacttccgcattgaccttggtgagatcctgtggcgactcctgattagcctcctgccacttacggaagtccggcatgatcatttgcgtcactttttgtttgagtggcatgttttcaatcagtttttctacttcaggagatgccgtctctgtcgaggttaccgttggggaggctgcagggacagcagcacggtctgttgaagtcggcgtttcggccacttctccctggttttctgtggtgctttctggacttggagaagccaccacctcttctactgttgctgccggttcattggcttgatccgacgcttgagctgtgtctgcctttgctgtttgaacggataatagagcaaaagcagctaatagggccgcagatggataaatgatttttttcataaagcgacctcctttctttcaatagatattgtaccattgttttatagttttgtaaacggttgcaacatctaaaacagaaaaaggataagcattttttacttatcctttagttcgttcatatttttttaaaacaccatttcttgaccattttctgtcacttggtaagtgccctcagcaagatcgattcgggctactgctgtgacagtctggtctttattttggcgcgtgatgacaatggtatgatcatctggtgtttccacttcaatgcttccttctaggtcaaaagcttgcgagttgttccggaaactaaagagcttgagaagggattgtacgactggtcgctccacttcttgagcgatttcttcattgctgtagtaatgacggttgatattgcggccttctttagtgttttctaagagttccaaatcattcttcccagctaggaatccaacataataaacctgtggaatacctggtgcaaaggcttgaattaaacgggctaggaagtacttacgatcatcatctccaagtgctgaatagtaggtcgaattgatttggtagatgtccaagttgttgtattctgctgtggaatatttgcgtttaacatttgcccctaccttatagagctcatttgaagcatagtcaatctcttcatctgtcaagatatccttgacatcgaccaccccaatcccatcatgggtatcgagcgtcgtgaattgcttcatcggactcatcttcaaccacttggcaaggcgatccacttttgaactatagagggtatagagggttaccattggaagtgcgaagtcatagacataatagtcgtgatcggcaatcttaaactggatggaatagtgctcatgaatctctggaagaagctcagcaccgtagcctgccgccatatcgcgcaccttatccaacaaatcccaaatgtctggctccacgaagaaatcattggtgtccaatttcttgactgcataggcaaaggcgtccaaacgaatgaggtcacagccattgctcgccaggtgttcgatggtcttgcgaataaagtccatggtcacgtccttggtcacgtctaggtcaatctgctcttccccgaaagtattccagagatgctcagttgttccatccgcaaaggtaatttcttgcttgggagctcgatctttgcgcttataaatcaagtccacatccgcttgagttggacgattctcaggccagaacttgtcccagttgagaaagaggtccttgtaggcactttggtcgtgcttttcttggtagtccttgtagtatttagactgacgagaaatgtgattgatcataaagtcaaacataagatagtacttgtcgcccaagcgtttgacatcttcccaatctccaaaggctggatccacttggtcatagtcgacaggcgcaaagccacggtcaccagttgatgggaaaaatggcaagaggtgaaccccacctactgcatccccaaagtgcttctccagattttcatagagatccttcaggttatttcctaagctatctgagtaagtaattaacatggttttgttttgaattggcataatggttccctttcttttttgaaagccaagtcttaggagacctggctttcttgagtttttctattttagaattgtttcctagggtacgattgaaatcagcaagctaaatcgtccctttgtatcttgttatttcactgcgccgttgctcattcctgcgatgatatggcgttggaagaagagatagacaatggtgatactgataatgccgacaacgtaggaagcaaagcttggtccgtagtcgttgaaatattggcctgcgtagttgtattggaacaaaggcaaggtccacattttggaatcccggttcaagacaaggagtggcaacatgaagtcattccagaaccaaagggcattgatgatcatggttgtcgcatgcatgggtttcatcattgggaagatgatgcggaaataggttgtgaatttattagccccatcgatctctgctgcttcatccaaactttctgggatagagattttgatataccccacatagagaaagagggtctgtggaatcgcataggtcaagtagagcaagatcaaaccaaaggtgttagccaaaccgagtttactcatcataaccgtaatcggaatcatgatgacttggaaaggtacgaaaatcccaaggatcaagagggtgtacatgatggtaaaggcttttctcttactcatattacgtgcgatggagtatgctgccatggggataaagatcattactgcaagtaaagacaagacagtgatgacgacagagttccaataatagcctccgattccatctgacaagagacggctaaagttgtcccatgtgaaattcgtcgggaatccaaagaaattatctacaatatctttggtgggtttgaaggaactaaagagggtggcaaggagtggcactaaaatcagaaccgatcctagaatcaatagaatgtatttgccaatcaaggcttttctttcatcttgtttcatcgtgcttctcctcttaaatttcaaatttcttagatactctcaattggatgatcgaaatcactacaatcaagaagaacaggattacggcaatggcattggcataaccgaattggttgtttttaaaggcgtagttataaaccaagagtccaagtgaggttgtggcattgtttggacccccaccagtcatggcaaagacttggtcaaaggcggtaagcccaccttttagggctaggataaagaccatagagacacttggcaacaagtaaggcaattcaatattccagaagacttgcttgctcgtcgcaccatcgattctggctgcttctgtaatttcagatgggatagattgcagaccagctaggaagataatgatgggcatggccaccccttgccaaagaaggacaaagacagccgcaaagatagctccccacttagtccctaaaagactagtttgaagaaactcaatatgaagggcattcccaatcgctggtagaccgtagttgaagacttgtttgaagatcaacgccactgtcaaaccagacaaaacagctgggaagaagaaccaagcacggaagaaggtttggcctttaattttagagttcaagacacgcgcaatgaagatcccaagggcaatctcaccaactaccatagcaatcgtgatgatcgcagtaaagccaatcgcattcatgaattttggatccataaagaggagcttaaagttgttcaagccaacaaacttgtagttataggtcaaacctgtccagttggtaaaactgtaaaaggctccttgaaacattggcacatagaagaaaattgcttgtaataagaggggaatgaccacaaaagcccatgcccaatatttttgtaatacttttttcattgtctctctactcctaatccacatccgctttcatcgggttaaagaaggcattcaaatcattgaccattccttgtttatcacctgtcaagacatagttcatcgtcaaggtatggaagtctgcttcactggtccagtattgttgcaaccagaccaagtgacgatctgtaaaggcatatttggtcatcccagcaagcggtgaatcctctcctgcttgtttgaccccttcgatcgctgttggagatccgtccacatcatagtacttttgcatgacttctggacgggtcatgtattccacaaaggcattggcttcttttggatgtttggtagtagctgagatagaccatgctaagtctcccgcaccaacggttaagctttgtcctttttctttccctggaatcatgaaggtcccaatcttaaatttcggtttttgttcattgatcgcggtgatagcccaagatccatttggtgtcatgaggacatctccacgcgcgaaggctccgataacgtctgtataacctgcaccttcccaattcttttgcttcgaacctttaatgcgaaggatatccatgaccttgatgtcatccttcataatcggatcagacaatttaatggaatttggctgagaataacgaaggtattggttggcttcttttcccccacctgctgctgtcgcaaaggccaattgattgtaaccattgagggtccaagcttctgctcctgcaatcccaaatggagtttgtcctttggcaacgatgtcttttactaactgttcaaattcgtcccaggtttcaggaaccttcaagcccaattcttcgaatttatctttgttgtagtagattccgtaagcattggctgtgaaaggaacgttgtagacttttccgtttacagcatatttttcagcgtagccgttttttacgcgtttgagataatctttattgcttaaatcttcgaagacacccgcttttgcccattcttgcagttcgatagactgtgggtaaatattgactacatctggcacatcccctgcgagaacacgtgttttcaatacttcaccaccatttggtacattgacaactttgaccttgacctttggattttccttttcaaaatcactcgcgatttcttccaaggttttggtcatttcttttttctggttgaaatactcgatggtcactgtgccatccgcagatttaccatcgttagagcaagcaccgagcccaaacaaggctaggcctgtagtcgcaagaagtccgatttttttataccatttcatttggctgtctccttttattttttgacaaaaacatattgtttgctgaggaaatctccctgaggaagaacgacggttaagccggcatacatgagctcagctcctgaatagacttggttcgtcccttctaagcgatagagcgcatcttcttccaatcctttgagtttcagggtcggctcgatctcctcaaccgttgataagacccgtacataggttacaaccgtgcggtcttgataagtgaactggacggctgcttgattgctaccttggcttggattgatcaagcggtagtgttttccgaactgaacaagtggtcgaatcgttttgtaatgagcgacttgagctgcgatccgatccaactcttcttgcggaagactggttagatctaattcatagcccagatttcccatcatggctacatgacctctcgtttcaagtggtgtcatccgtcccatctggtgatttggcaccgctgatacgtgagctcccatagaaatggttggatagagataactagatccatactggatgggaagtctggccatggcatccgtattgtcacttgcccacacttgagggaagtaacgcatcataccaaggtcattgcgaccaccaccaccggagcaagactcaaagagaacctggtcgtatttctccgtcaagtaggaaaccacttcatagaggcccaagatataagcatgggattgcatcttggtttcaaggtaggttttcccatttccaagcttggtgatattgcggttcatatcccatttgatatagtcgatctcatggtttccaagtaagtcatccaagacctgcttgatatagtccactacttctctatttgagaaatcgagtaccagttgatttcgtgaataggtgtgttcgtagcctgggacttgaatagcccagtccggatgagcccgatagaggtcgctatcaacagaaatcatttctggctccacccaaaggccaaattgaagtcccttgtcgtggatgccttggatcaattctgctaggcttccccctaatttttcttcattaacggtccagtcaccgagggcccgattgtcatcataccgattgccaaaccaaccatcatcaagaacaaagagttcgatgcccactttttgagcttcgtctgctagctccaataatttgtcttttttgaaatcaaagtaggtcgcttcccagttattgatcaggatcggacgttctttataagcaaacggtgctggaataatatggctttgaacaaaagcttggctctcttggctaagaccggtcaatccctgatgggagtatgtgatcatggccactggcgtatcaaaactctgatttgcttccaattcccaggcgaagttttcaggattgattcctagtccaacccgaacttcattgagttgatttttctgaacaaaagcttcaaaatttccactgtagagcagttggaaggcaagagcagaacccgcatcttctgtcacttcatgatcagcgagaataagggctggggtctgggcgtgtccagaagcaccacggttagagctgatggagaagattccttgctccacttgctgacggcggactgttttttctctcgcataggccccttgaagggtgatgacatcatagtcacctgctgggacatcggccaacacactgagggccttgtggatcacgacggtttcatcactccagttttcaatctttaaaaagctggtgatggttgcccgatcctcgtaagccgtgtaatagagggttaaccgaagggccgcttgatcatcttcaaaaaccaaggccaaggtttcagcgctatctactgtatggggattgggaagaccattcgcctcgacactaccagagtagatattggctccgacatagaggaaatccgtcacctctgtggcaccgtgctggatttgaatagacggctttcgaaaatctccaagcccatgctgtcctaagatttgacgttgggtatccaagctgaaggttcgattgtcaggtgttggatttccagagaaagcatgatccttctcatgcaccgtattggaaaaatgataagacggaatcggacgtcccagatgcttgagcatcaggtagccatctcgattttcaaggatgaggctcagtcccttactttctacatagaacaaattctgttcaatacgaattgccatatcttcctccattgggcccgaaataatatcactatgtatttttaaattcggttccaataactttcttttttagcatgtctttattttactcgttgtaaacgcttccgaaaatagaattttgttgcacatatatggtaaaatgttaggtaggaggttcaaccatgtcagtcttttctgaataccaaaccgacactattgacctagcccttgatttttatggctacgaagattgtccgaagaattatgaatttggtcctagcgtccgagataattttgtactgcattttgttaccaagggaaagggagtcttccacttcaataaaaaagaaatccacctagaggccggggatctctttcttctccccaaaaataaagtgacctactacaaggccgatgccgaagaaccttggtcctactactggattggcatcagtggcaccaaggtgagtgatttcatgcgtttttcaaccctgcatgaaaaaggctttttaaagaaaacagaagtggaaacagaaaagatcggccagtttatggagcgactcgtccacaaggcagaggcttcgaaaatgacttctcactaccaactccatctcctctcgcagatctatgaactactatttctaatcagtgaagtggctcccgatatccatcggagtcatccatctcccacctatcagctctatctgacctgtaagcatgtgattgagacgcattacggtaaagaacacttgagtattcaagagatcgccgatgacctcaatgtccatcgctcctatctgacaactgtctttaaggagtttcaccagatctctcccaaggaattcttgcactcggtccgcatgcagcgtgcccaacagttactgaccaatacggacgagagcatcaagattgtggcctactcggttggcttttcagatcccctctatttttcaaaggcttttaaggcctatagccaactgactcctagccaatatcgtagcaaacataaaatttagtaaaattttatttctttttactattttttagagtatactggaagtagaaatcaataaaggatgaactatggcaacgattaaagacattgcggaaaaagcaggcgtttctcaggcaacggtctctcgcgtcctcaaccaggatgcgaccttatcggtcagtgaagacacgcgcagtcggattcttcgcatcgctgaggacctccattaccaaaagaagagccgcaaaacagcgcctcaaccagttgaggattttcataaaatcgtcatttttgaatggtacacgcgcgaagaagaattagatgacctctactactatgccattcggatggggttagaaaaacaagcccaggaattaggctatgagatctttcgtatctttaataatgacgattggtccttgattcaagaggcagacggcattatcgctcttgggaaattcagtcccaagaccattcgagatctagaaagctacggcaaacccctgatctttgtcgatagcaataccctctatttagggcattcctgtgtgacgaccgatctagaagattctgtcatcaccgctctcgagcatttccttgagcatggccacaaggagattgggctcttggtcggtcaggaagagacggcagatgcgacaccgcttcagatggatcctcgtcaacgagtctttcaacagtatctcacggagaaagggctctatcaggatcgctttgtcactgtcggccagttctcaactgagtcgggctatcagatgatggagcagctgattcaagcactgggcgacgacttgccaactgcctttttcatggccagtgatgccatagctgtcggagcccttcggtcccttcaggagcaccaaatcgcagtacctgatcgcgtcagtctcatttccttcaatgatacttccatcgccaagtatgtctttcctgccctctctacagtgaccgtctacacagaagaaatgggcaagcaagccattcagctgttgcgacaaacctttcagggggctcaaccaagtgttccctgcatggtcaaattagccaccaaactgacgattcgagacagcagtcgctaggaggtcttagtcttatgaaaacacacgaaatcctctttcaaaccctttctcaggcagatgattacgtcaacggggaacagttggcaaaagaactaggcgtttcccgcacctccatctggaaggctattcagcgcctggaaaaagatggggtcgtcatcgaatccctaaaaaagaagggttatagactggtctcaggcgatattctgcttcctgaagtcatcgccagcaatacccagttgaccgttactttgaatgaagaatgtcattctacccaattggacgcaaaattaggcatggaagcccataaagagggcagggctctctacctggccaagtcccaatctgctggaaagggccgctttggtcgcgactactactctcccgatcaagggggcatctacatgtcccttcacctcaagccccaactcccacctgcggagctccctccttataccctcatggtcgcaggagccatctataaggctattaaaaatctgaccctgatcgatgtcgatatcaaatgggtcaacgatatttactaccgccataaaaaaattgggggaatcctaaccgaagccatcacatccatcgagactggccttgtcacagatgtcattatcggagtcggtctcaatttagccatccctacttttccagaagcgctagaaagtaaggcaggttccttatttgaagggccttgtcccatcacccgcaatgacctgatcagcgagatctggaaagaatttctccaaacggatgtcgatgaactggtctacctctataaagagcgctccctggtcttaggccgaaccgttacttttgagcagaaccaacagacctatcagggcctcgccaaagatatctctgataccggccaactcttggtccaattagacaatcaagaagaaatctggctcaatagcggcgaaatctccttgacgaaatggtgaaaacgagtatagaaaaaaagccacccgaaggtggttttttttgatctattttgaaagctccttctacccaaagactacggaacttcattctttttaagatatccataactagttacggctttagctcttgctccattttttttacaaagtgatttaatgctgtttgcactttttctaggagctctgtttgctgagaatcactgacctcaactcggtttgtggtcccatctttctcaatatggaaataactaacatgtagtaatccccactctttatctaatgaaaaggctacatctattttttcaccctcaatgatcgttgaagaggtaatcaagattttattgtcatctggactaggaactcgtaccatccatttcaaatccccatccatttccagttggtctatgccacccacacgtctgatctctgcgtctgaaggaatcccatagccagcttttctaatggtattggcattacgatgatcaagtattcttgccagcaattcaattttatttttagatgaaaaatttagagctggttgttcattcggaacaaagagaagccaagctactaacacagtaattcctaataatagaaagatcaatcctttttttagcacagacatcctcctttcctcacttcttttctagctcctcttcgatgtatgtctagtatagaacaaaccaccgcgagggtggtctgttattatcgtaattaaaaacacctcaaaagctagaaataatccaacttttgaggcgttaatcaattaaggctcattattgataacagaaccaccactactgaatgtataagaaacaccgtctataattaaagttttattcattgcaaatgcaccaccgtcgttaggatcagcataatatcttgttccgtttaaatcaagccagcctgtttttaaatcacgattaactgggtcaaaataatatttttttccatctattaatgtcctctgacctacaaatgccttaccaaattcgtcaaagcaatacgttttcccatctatagtttgccaacctgacaatccttctccactttctgggttgtaataataccattctagaccagggtatccttgtttagatatccagcccgttttcatatcggaattaactggatcgaaataatatcttttatcacctatcttttggaaaccttttaacgcactattttcaaagtaataccatttcccatctatatttctccaaccggtagctttttctccgcttacagggtcgtaataattccattccgtaccagaatatcctggattagatatccaaccagttttcatatcacaattaactgggtcgaaataataaagttttccatttatattttcatgaccagaacgtgctccaaatggagtaaggtaataccatttcccatctatcaattgccagcctcttttttcctcaccggttacaggatcataataataccacccagagtaatctccaccattatacacattatattgccagccagttatcatatatcctctatcatcaaacttatagcttttaccgtcaatattagcttctgtgtttttataataagaaccattgttcagtgaataccaccaaccaacattatcttgatgccaatcagccttaacttgtgatactggggttaaaagtaatattagcaatgcaccacctagcaaacacttagttgcttttttcatttgcatttcctccttatattttgtatacgctttcattgtagcatgtttatttctctaaatcaaataatgtgtggatataaagaggtcactgtcaacgaattcaaatataaagtcactctctttttatttgtcctttaaaaggctatcagtgtccacttttagataaaatcatataagatattatctaaaagtagaccaaaaagtaattaaagaaataacctgctctattattaaaattttagcaactgactttatcaatgattataaatgaagcttattagctacctaataactcactctggttatataataaaattctttatcatcatagttaaaaacaccttgaaagttagaaaaaaatctaacttttaaggtgctgatcaattaaggtatattgtttataagagtacctccattatcgaatgtgtatgaaataccgtctataattaaagtcttacttcttgcaagtgcaccaccatcatttggatctgcataatatttatatttacctgactcaaaccatcctattttcaattcacaagtatctgaatcaaaataataatcttttccatctaaaccacttatatgaccactgtatgccccatacaggccaaagtaatactttttcccatctatctcttgccaacctgatagctgtttcccactttctgggtcgtaataatatctttttgtaccagaggcctcttgtatgcttacccaacccgtttgcatatcgcagttaaccggatcaaaataatatttttctccatctaaattctgcgaaccttttaaggcaccaaatataaagtaataccatttcccatctatatttctccaacctttaactttttctccgcttacagggtcgaaatacatattttctgtcccataatggaattgttcagatacccatcctgtttgcatatcaccattaactgggtcaaaataataatttttcccatctatcaattgctcaccaataagtgctccacttctagtaaggtaataccactttccatctatattttgccagccaattttttgatcaccatttactggatcaaaataagaccagtttatttttttcagactagtagcattacgctccgctatcggctgccagccggtcatcatataacctctgtcatcaaatctataccacttcccgtcaatataagctcctgtgtttttataataagaaccattgttcagtgaataccaccaaccaacattatcccgtttccaatcagcctttacttgagacattggagttaaaagcgatatcacaatcgcactagcaagcaatagcttattttttttcattttctttccctccttgcacgatctttgtatacgctttcattgtaccatgtttattactctaaatcaaataatgtgtgaatataaggaggctattatcaatgtattcaagggtaaacaaaaaaatttgcacaatttgcttataataaaagaggcacttactactctacttattttcttccaaaatattgccaatgtccatttaatgtcaaatacaatgtgacttatccatcaattgtttatttatcgattgcgaaatcccctaaaagcagtaatttgaaaaataacaaaattttaaaaatcttaaattgagtcttgaatattcatcatagcaaactctcaactttccggaaaacgtttctttttttagaaaaatataatttcattatttatcattcaataatttttgattccttcatactccccaaacaccatccccctattatccccccacttgtggtatgatggtagagtatgtttaggtgccgtcaaccctgctcgagcacctccgtgctaaaaggagaacgaatatgaaaatcgcatggaatgaaattaaataccaacccaagaagtttatcctgattgaactcctcattaccatccttatgtttatggtggtattcttgtccggtctgacaaatggactgggccgttcggtatcggcccaaatcgataactatgggaccctgcactacatcctttcgacggattcagaagggattatccccttttcaaccattacagcgaaagatttagatgaggtccaaaagataaaagggatagactattctggcttgtccatccagcgagcaaccgtctcaaaaacagaggattccaacactctggatatcacctacttcgcgaccgatcacaatgaaaaagagatcctcaatccaatcatggaagatacagacctcaagatctccgacttacagaaaaacgaggtcattttggacagttctttcaaagaagatgagggaatccaagtcggcgatcaagtgatcgacaaaacttctaagcaaaaactcaaggtcgtggcctttgcgaaaaatgctagatacggctatagcaagattggttttatcagctcggagacctacacaggtatgcagcaaaaaacagatccaagctatcaatggcaagcccaaacccttgtgaccaagaagagcatcacttctagtgatctagccagcaacttgatggtggcggataagaagcaagtaatcgataaaatccctggctacaaggctcaaaacctgacgctacggatgatcacgtgggtgctgctactcgcttcttctgctatccttggggtcttcttctatatcctgaccctgcaaaagttgaaacagtttggtgtcctaaaggccattggcatgtccatgagccagattacctatgtccaactatcccagctcaccatcatctccctcatcggagtactgctggggcttggtttggcaactatgatggcgccatttttacccaatagcgtcccttcctttatgaccctgaaagacaatctcatcatctcggttagctttatcctgacctctattttgtgtggtgccttgtcccttgtcaaaatcaaaaaagtagatccaatcgaagtcattggtggaaatggagaataagatggccattatcgcattagaaaatatcaggaaatcctacgccgatggcagccagatgcaccatgtcctcaaccagctgaatttaagcgtcgaacccaaccaatttgtcgccatcttaggcccttcaggatctggtaaatccactctcttagctatagctggtttactcttatcagcggacgaggggcggatttctatcgctggccaagacttgactgacctcaaccaaggccaatggacgcaaaaacggctggaattgctcggctttatcttccaagaccaccagctcctctcctatatgaaaatcggtgaccagttagaactggtggccaaattgaagggggaaaaggacaagaaaaaacgccaagaagaagtcaaagccttgttggcagatctgggcatcgaagcttgttaccaccaatacccgaatcagatgtctggtgggcaaaaacaacgggcagccatcgctcgggcctttatcggaaatccccaggtcattttggccgatgaaccaacggctagcctagacccagatcgagggcaagaaatcgctcaattgatccaaaaagaagtcaaatccaaaaacaagagcgccatcatggtgacccatgaccgctctatcctgacctatgtggataccatttatgaattaaaacacggccaattgctaaaggtagaaaaggttgattaaatacaagcgagtgggacagaaatcggtaattcgttagaattcgatttcgtcgtcctacctccgcacagttgagtagggctgtaaaagctgatgaaatcagcgtagtagagcccactcaaccactgcgtcttgctcaacaaaccaaaaataattgagaggctaggacttttgtcccagcctctttttattcttgtggctctttgggcagttccatacggaagcgtaagcccatagccgttttatcaaattggtaggccagttcttcatggtctagcaagtgttggaccacaaagagtcccaagcctccttccttcttctggtggctagcagtcattggcatctcagcggtctctaccatttcctggctggtattttcaaccgccaagtgcgttccttcctcttcgagacggagctggatctctccaccggcatccgaatgcttgacggcattactgatgacatttgagagaaccaatttcagaatcgctgggtccatatagacggctttgtcagggatctgattgtcaatcgtgagcgcgcgggattgagccaagaccttgtactggtcgaggatctgctctacgacctgatccagctggatccactccttgtctccggccaattcttggacagaggacagggacaggatttctaagacgatctggttcatctcatcgacgatatcgagggagaccgacaggtagcggtcccgatccttgtagcggccaatcttatcccgcatattttctaggataatcttcaagctggctagcggcgtcttgagctcatgcgaggccccccgtaggaattcgaccttcatctgctccaacttcagattttcctgtttctgctgctctagattgtcgatcacttctaggagatggtgatagaggtcgttgatctgttgcttgaggacgccgatctcatcctgcgaatgaatgggaagactggccgtccgatccaaacgcttcatccgcttggtcatctgcttgatctccaggatcggagcagaaatcaggcgggcatagagataggaggcaaggagtgacagaacaaaggaagcgaggagactatagggaagaaagcccagactgatgtcccgcgcttccttttgggaatcgacagttgctaagaattgcaaggtcaagtcctttccctctttggtctggatctttcgctcttcaatgaccagggaattgttctggctatccgggttcaggagcaagtcatcctttacctctagggcattttgtttttccttgcccttgattgagaccttgatatcattggttttggaataaaggtcgatgaccgactcaatggtcccttcttcctggccttggaaactcttggctagggcctgtgatttcttcaaaatcgtctggcgctgagactcgatataggtcgacgggaaaataaagtaaaccgaagcatgtagaaggatgactaagccactaaatagggcaaaggtgatcagaaagatctttgcaaagatactccgtttggtcatggtctctccaatttatagccgacattgcgtaccgtaacgatacagtccagctctagtttttttcgtagttccttgatatagacatcgatcacccggtcaaaaggaatctcctctgtctccttccagacggcatcgaggatctgagagcgggtccgtgccttgccctcatgatggagcaagtattccaagatttccaactccttggcattcatagagatggcttgcccagctagactggctgtgtagctctcaaaatccacccgtgcctctccataggtgaagacccgggaaggctggagctttttaaaaatagcttcgatacggacctttaaaagtgacaaggagaaaggtttttccaggtagccatctgccaactctccaaaggccgtcaacttatagtcctcgtcatggaaggccgtcagcatgaggacagggactgagctggtcttccggatggtcttaaggacctccaagccattgaggatagggagctggatatccagcaagaccagatctggcgcctctctgtgaaagaggtccagggcctcctgcccatctcctgcttcaaagacttcataaccacattccatgagatagtcgctcatcccttcgcgaatcaggacttcatcttctacgattagtatcttcatacactttccttttatctaagaaacttcttctacctcctattataccctatttctattttaggaaacaatctcttattcgacatccaccaagagatcttttggtttcttatgcaagagccattgagaagaaaggatggatacgagaatcaagaggaggccgccaaccaagacaatcaccagcaattggctcggttggatgtccatatggaggtctgtcagggtcttactgaagctttctgcctcagctccaccaccaaggttggctgcagaggattcttgagccatttgtttggcaatgccactggttacgttcttaagcaccgtatctcccacagctttggcaagaagtcctgcaactccataggaaaggaggaaggctgggatggaaatcatgaccaattctgctacgaattgtcccgcaatctgtaccttagagagtcctagagccaataagattcccacttctctgcgacgggcattgagccacaagacgaggagaagggtgagaagcaagctagcaaagatgaggctaccgataaacaagtagtctgccacttggaacatgctgctaatggatttttgcaaggctggatagttagaagagctcttaaccaagtcaaagtaattccatgggatatccaaggctttgattttttcgatcaaggcatccaggtcctgatcccccttggcaaagaaggttgcatcctcataggtagctgtttggacagtattgccatagagtttagcagctgtatccaggtcagaaatgagggtatcttcatacaattcttgggcgtaagttagaggagcttggttcttccctgagaacagacccttaatggtcacttcgacggtttcattggcccctttttcattgtcagcatcgtagagattagacttgagacgcaccttatcgcctaccttgaggccattctttttcgccaaatcttcgtgcatgaggatttggtttttgtccttatccgtcaggtgctccccttggaccagcttgtaggctccagagacaaacttatcttctttagaagagtcattgacccctgtcaccatcaaggtattcttgaagtgcttggcccgctctggagattgattttgcagggtttcttcagtctcaatgatctcgtggtctaggatatccgcgatggcattgatccgcttgatagaggaggtgatcccctctacctggctgattttttcgatatcttctcctctgagattccctgctccccgaggggttcctggattggtccggcggttgatctgcatggagaagctattggtgatggatcccaggctttccgatgaagcttgttgggtcgcccccttcatggagagtccgatcaagctcaaggtccccatgaggagaatgatggcaaagagcaagagagacttgggccatttacgtgtgatataagcaaaagcatttcgcaacatagcattccctccttacttgctcttctcaacgaggctacgacgactcaattccaagaccacatctgatgcttctgccacttccttactgtgggtgacgacgatgacacatttttggcgttccttggccagtttctttaaaatggcaatgatatcacctgctgtctgttcgtcaaggtttcctgttggctcatctgccaagatgacaggtgcttctgaaacgagcgcacgcgcaatggccacccgctgttgctgcccgccggatagttgcaggacattgcgtttgatttgcgtttcgtccagccccaattccaagagaatgtctttcccagcttgtttgttgaccaggcggacattttccagtggcgtcaaatagtcaatcaaattataattctgaaagaccagggagacatggtgcttgcggtggtagctagaccctttggtctggatgtcctccccatcaaagagaacctgccccttcttgggattgtccagtccagccaagagcgagaggagggttgatttccctgctccagattgaccgataatgctgtaaaatgtcccatttttgaactgatagttcacgtctgagaagatctcttcttggtaactttggtagctataagatacatgtttgagttctaacataggtgttatttctccttaactcatttttgttaatatttcttttggggtcttgcgccagatcatgctggtagttacacccagcgacaaaaggattaagcacaagaggctagcataggcgattcctaaggaaaggccttgagggatttggttgagcaagtctagggtctgctgttgaccggtctgtccgacaaactgctctaagaaacgatggctgaccatccgcccgatgagaaaggctgggatcactgctagtaaggataccagcaccacttccaagaggaactgtctaaagatccggcccttgctcttcccaatggataagaggaccccgatttcatgaatccgctcccgtgtccagagactgagtaagagcgatagggcaccggctcctgtcaccaggaggacgatcatcatgatccgtaccaggccttccagggtctgagaggattctttcatctggtcaaaggccttgcgatcttcgaccacgcgcagcgattgccaatccagatccaagcttttaacttgcttcaagagggcatcgattttctcaggatctttgacgccaaaggtgacctgggtcacttcttgctgactgagaccaaggagcttggtagcatcctcataagggaggtagacttgattctcactcagatcagaggtcattcctgtgaatttttcctgtttcttacctgaaaaaatcccaacgatttcaaatgtttgctctttggcaggagtctctcccatctgaaagctggataaggtcaaggaatctccgacctttaacttattcttcttagccaactcttggtggatcaagatctgcccgcgagcctgatcggataagtgcttgccttgcaccagttggaaactgctactccggaaatctaggtgctggtctgtcttctgggtgaagacagcgcctagcgcttgcttggcttcctgacccagatcatcccgttctaccgattgctgtcccgtcaccgcttctttaccaagaatacgaacgggactttcatattgaggaaccatagatccaactccagctagctgctgcaccttttcagcttctttcagagaaaagggcttatccccctgcttactggtcagggcaaagctggtcccagccgactgcttgatatgatcctccagccttcctcctacttgcatcagtgaaaaacagaaatacaagcaagagaggattaagagcagaatcagaaagaggaccagattcctcgttctttttcgagaaatataggcgattgcctgttgtaagagcatgatctcaccctccatttcaaagcccacagcaatgcaatatgggcgctttcatcatttgttatagttattatagaaaagaaatgtgaaatgtttatgaaataaaaaaagtttcctagattttctaggaaactttattcgatttaaataatattagaaaaatatacttcccacttgcttgaccttatttttcaaagactcctccttcttggatctttgaaaagatctgatcggtcagtcgaacattcaagaagctccaaagagcaaaacctccaaaggtaaagagataaatagctgtcagtaaccgttcaggactactgagactgatataaatcactgccagattgaaaaagacaagaaagatggtttgaataggatttaagagagcaatgaggaaactattcagacagacctttcttgtagggtcttcaaagaggccaatataagggaagatcagggtcatccctccacatagaaggacgataaaaggaagcaagatccaaatcccatactcacttaagaaggccgtatttgaaaaaagacagtaatccagataaagtagcactgataagcctagacaagtcaaccaaatcaccgtcgcttgcttgaaattagcacgaaagagacggaaaaaatgaaagacgagatccgtatcttcccctttcaacaagcggtgccacatggttgctaaagccgtaagcgatgcaccgatcgtgagaatcggaagacagcaaacgataaacaaggtgttcaagataatgatgtctgtcaaccgggtcaagatcttgaccaagcgtccatccaatgaaaataatttttgcatcttcttctccttgtgcttcatctcaatttctgctacttcctctagggaagcactcaggggctttacgcccctgagttacttacttgaatccatttagacccctattatttcacttctttttggtaacgatcataggcatcctgttgaatcttcataaagtcatcaatgcccatcttcttcaaggttgctttgtaatcatcccattctttttcgatgcccccttctactacccatttagaagcttgttgggtaacataagagttaatatctacataaatagaggataatttgttcaattcttcttgagagtagatgacatttggatatgctggcaaagcgtattgtttcaattctttgtccatcttcaatttgaggccatcaccctgtgtttggtcgatgtcgacatgactattgatatcatctgacacatattttggtccaaagtcacgaagggaattgatccaagcccattcatcggcagatttaccatcttttggagccaagaccttgtacttggcaccatctttttcagtcgcaataccaaaggagccatagaagttttggatgctagcatcatccgtgtagaatttatccaaccatttgagcaattttgcagggtccttgcacttattcgtgatcaggatttcattgcgtccatagttcaaatgatctgggtcagaaatgacatattgtttgccatctgggcctttcaatgctggaagaggagcatattcgctggcatgttggccaaaggttgcatctgctgtccaaccacttgatacaccgacacgcgccactcccttgtccatccgtttggcaacagacatggaggtatcttctgtaaagagttcagggtcgatcaagcctttcttgtaggcttcatgcatagcagctatcccttgtttataactttcttccgtccggaggtagaccggtttgccatctttgacggacatttcataggtattatctccacccagacggttgttgaatggcaagatataagagaaggtcggatcaaagttaccagagccaaatggaatttcatcattgacatccccattgccattggcatctttgtccttgaatgcttgtaaaacagtcaccaattcatcataggtttccggcatcttcaagccaaggttgtccagccatttcttattaataaagagctggttgccgacgattggccgcattggcaatttcttaggcagactgtaaatatgaccatctggattggtcaccatggcttttaatttcggttctttttcaaaggccttgttcaagtttggcatattgtccttgatcaagtcttccaatggaatgaacatattttggttctgagcgatttcagaatccgtgaaggcattggatcccaagaaagcgtctggtaaatctccactggcaacaagaacagatttcttatcagaccagtctgcagccaccatggtatcccatttgatcttgatacctgattccttggctgaatcatctagaaaacctttgtgatagtcttccccccaatccgaccaacgaacagtcgtgatcttgaaggtatttccatcattcttgtcagtgcttgatttatttgtggaagctccacaagccgtcaagccagctaaagcagctgctccaaggagcagataggcaaatttcctgtttttcatgatcttctcctattctttcaaggcccctatcatgacaccttgattaaagtatttttggacgaatggatacagcatcataatcggtgctgttgagataacgatggctgcatatttcatcatatcagccttaatacggaggtcagaagctacctccccagttgcttgcgattgcaacatttgattactaattaagagacggcgcaggatcagttgcaggggttgaagattttcattggtcaaataaatcagggcattgaaccaagaattccagatccctactgctgtccaaagtccaataacggcaataatagccttggacaaggggagcacgatctttctgaagtaataaatggttccgcaaccatcgatctgggcggcttcccacatcccttctggaatactattgttaaagaaagttcgagctacaacgatattgtaaggagatactgcaaacggtacgaccattacccagaaggtgtcgaccaagcccaattgtttaactgtcaaataaatgggaatcaagcccccagagacaaacatgggaacgataaagaagacactgacccatttcttagcaaagaggtcctttcgcgacaaggcgtaaccagccgggatattaatgaccagggcaacgatggtccctacaactgtgtagaggatagtgttgagatagctctttagaaacaaaggttgctcaatcaagcgttgatagccatctagtcgccattccctcgggataaaccaaaccttaccagttgccacatcagacggattactgaaggaggcaataatgacaaaccacaaagggtagacaatcaagagaatcaagcaaatcgctagaccatagataaaaatatcaaagaggatttctgacttggtctttcttgcatgttgaaacaatttcacaatttctcctcctttctagaataatcctgtcttggtatagcgtttcgcaaaccagttgaccgacagtaagatgatcaagttaaccaaggtattaaagagaccgatcgctgtcgaataactatattggaaattaatcatccccactttgtaaacataggtcgaaatgatttcacttcctgccagattgagtggattttgcaagagcaagaccttttcaaaaccaacactgagtaggcttcctgctctgagaatcaagagaatcatcgccgttggtaacagtaagggtaagtcaatatgacggattttttgcaatcgactcgccccgtccatggtcgctgcctcataaaaggtcggatcaatggccgatagagcggctagatagatgatactatcccaaccgatatgttgccagacatcactccagacatagacacctgcaaagctacctggtttagataagagggcaggcatctttaagccaaccaatttgaggacattggctaacagtccactacttggggagagaaagagaataatcatcccacacatgaccatggtcgagataaaatgaggcaaataagtcgttacttgaaagatttttttgaacttgcccacacgaatctggttgcaaataatggctagaacaatcggcaagggaaaaccaaccagaatactgtaaatagaaattttcaaggtattcttcatggttgtcgcaaattggaaggatgagaagaactggttaaaatacttgagaccagcccaaggacttccaaatatcccagtagcgggagagtaatctttaaaagcgatgactagacccgccatagggatataggcaaataaaatcaataaaataatcgatggcaggagcagcacatataaaggaatatttttcttaaatttgctctgcttcgcattaacttcgcttttcataaggccctccttttctttctcctctattttataggaatcctttccatctttatagaactttttcgtgaatcttcatccacttttccgttttctccacacaaaaacatgcactttcccgattttttttactttactatcggttttgttcatgaatccgttttcaaatagtgctataatatatgtgaggtgctcattatgaaagctattcacagaagtacacgagatcactcgattcaatttttttcgcgcctactctttctcctcttagttgtcaataccttgatcaaccttttgattggtgggattagccgaaattttattaaacaccaaaatatgctccatttagaggactcgattcatatctatgcggattccttaaatacagagcttcactccgttgagcgttttatgtacagtaccattagtcacaacgactatttgacagagctcaatactccgcttgatttcacggattttcatgaaaatctaaaaaaattgcggatcgattttacggagtttcagtaccagatggatagccccattacctttttcatagagacaagagatatcccccatttttttaatgcttccagtcttcaactgccctacctggactatgtacaattgaaagatcatcttaagacctatgacaaagaaacagacaagaccaatcaaaaatggcaacgaatcagcctgaaccagcatgattatctcttgaaatccctccattacaagggcaaggctatctatgccatcatttctacccaggatattttaaaacccttgcaaaagctcaatattgggaaaaaagggcgcttatccatcgatcgccccaaccagatccatgctacagattccgtcattcaagccggtagcaatcaaacccacctgccttttgatctgtatgtgacggtcgattacggagacgttttccgtacaaatatcgtactggaaacccttctttctttggttcctttgatcatcgccgttctctctaccattctaatcctttatattcgtcaacggatgatccaaccgatgaaacgactcacccaacgcctttctcagctagacgctgcttccaccaagctagatgtgatcgaagaccaagggatcttagagatcgatcaggccaatcacaagctcaatcaggtcctgatccatatgaaagaccttcaaattcgagcctaccacgcgcaactcaacctcaaaaaagtcgaactcaattacctcaaaaatcaagttcgaccccatttttacctcaacatgctttccatgattcacagcatgctgcagaccaaggactataaggaaatcgaggagttgaccaaggtgacttccaactacttgcgtcacctctttcaagctaaccaagatttcaatcgcttagtagatgaaatccaacatatccgaaattacctagaaatccaaaaaatccgctatggggacagcatccactttgacctggactgggatcctcatctgaaagatgcggctattccccctctgcttttacaaacctttgtggaaaatgccatcaaacacggcttttctttccaagattccttccacattcagctttctattcatgaagaagcaaaccaacatcttgccatttctcttcaggataatggtcctggttttagctccgctatcttacaagatctagaagagaaaaaatccttagtcactgaagatggccaccacattggtttgaccaatgcacgggagcgactagatctcctctatccagatcactacacgcttcaattttcaaatggatcccaaggaggtgcccgcatccaactgagccttccttatgaaccctacaaaggagacacacatgaatatcctactcgttgacgatgatcgttttatcattaaagccctacaggaaaccatccattgggaagccttgggcattgagcaggtatatactgcctccagtctgagccaagcccaagccatcattcaaagtcacccgattgccctcatgatcagtgatatcgagatgccacaaggcagtgggttagatctcctagcctgggtccggtcagaaaaatatgacattcaaacgatcttcctcaccaattatgctgatttcaattatgcccaaaaagccattgaactccaaagttttgaatactacctcaagccgattgacccagatcgcttagaatttatcattcaaaaagccctcaataagatcaagcgccacaagagtgcggcccaattagcccagcaaggacaaaaagaagctgaattttggcatgactacttgcgaaaaccacgtccatctcaagcagaacagctccttcaagaagtgataaaacggggttatagccccaaaccacatgaagactacctcttagtcctcatcactctccacttagttgaagaagactttcaccccagcgtcccttcttggcgcttgcagctccgccattgtatcaaggatctctccctggatttccctgtccactactgcgccctcagtaaaatcgaaagccagaccgatcgctacctctgcctcttcaaaaagaatcagactacagagtgtgcagacttcctagaggctatccagcagaagatccagcaagacttagaccgatcctctatccttctctattcagatgctatttcccttgagacgctcttgatgaaggctctgcaactctgccaatacagtgaagaacaagtcttccattggaacagtatccactcctatgcttctttgggtgcacaacctcaaaagcccgctcatcggacatcgcttacttttacaaatcaactagagacggaacagcttctccaaatcatccatagcttagagactcaagatcgcatcccgctctcagctctgagtgaactccagctagactggacccagcaaattgggatttatctggacaagaacggcattctcgcccacaagttatttcaaaacaaacaccatcaatttctcttcgaacggcgttttcatgccatcgaagcttttgaagcctatattggggattactggagctctgctcgccattatgtgatcgatctagaacaccaatccaatctcatccagcggatcaccgactacatcgaccaccattacaaggaggatatcagtcgcaccaagctggccgaaatggtttttcttagtccagatcatctagcacggatgtttaagcgcgacaccggcgaaaccctggtgaaatacatcaccgataaacggatggccgctgcaaaagagatgctatcgcaaagcgatacacccatttaccaagtcgccctccaggtgggctatgacaactactcctactttacaaaggcttttaaacaaaaggtcggcctctccccaggagattaccgcaaacaatgccaagaagccttttaaaacaagaaaaaaacctttgaaaaaggattccttttcaaaggttttattttcttctcttcttaatttctttttcaatggcactagcaattttctccaccatataggccgtctggagattgcgcaagatcaagagggcccaaaaacatgcaaagagcatttgacccgccatagtcgcttcattgaaaaaataagtctccatagcagtaaagactgctatcactgcaaattgttttctattcataaaattattttaccatgattcagtaaaaaattcatgtattaatcgtcttgcagggtgattttatcggataaaaagtgaaattcctcagggatgacgctttcctcttcttccaccacttccgctttttgcccacgcgccttagccgaaaactctgcccgaatttgggtccattcttccatcgaaaccgctaaaatctctggtgagaagccagcagcattgctgaggatatttccaaacatggtattgaggttgtcccgcttcatggtctgttcggcattaaaggcagactcaaaggctaaaatcgcatggttctcattggcagcgaccggctgggatccgattaagagggccttatccgcacctgccaagctctcgatgatttccccccaagcattctgaagacggatcaagttggtccgtgccaactctgggttttcaaccgcctcttgcaagatcgcgttgaccttgtttcgatctgcacggtagcccttgctcgacttggttgggcgagctactgctggttttgaagcaggaagactgctacctgattgcgctaactgttgcttgagctgtgcgacttccttttttaagtcttccagctgagctagcacattggaaggaacctccagagcagctgagttagaaacttggcccgtgctttcagccaatttaatggtcatcatttcagtatagatacgcggttgcaggctatttttgatatccgctagactagtcgtcgcctggtcaatcagggcaaaaagacgggcttgatcggcttcaagattcgccgcaaataagtcactagcgtgagtgttttctccgcctgtctggacaatcaagagatctctcagatattgaagtaagtccgtaacaaagcgggccatattcttcccattatcaaagataatcgctagctgatccagcgccgctgtcgcatcatgagccaggatggcagccacgtactgatcgagcgcagctagactgatggagccagtaatctcttcagcgattgctgtcgtcaactcactacccgcagtcagactcagggcttggtccaaaatggacaaggcatcccgcatcccaccttcagcgcgccgagcaatgatctggacagcatctgcttcataggcaatgccttctgtagctaagatgctttccaaatggtgaacgatatccggtagtttgatggatttgaattcaaagcgttgcacccgtgacagaatagtggctggaattttgtgcaattccgttgttgcaaggataaagaccacattttccgtgggctcttccagtgtcttcaacaaggcgttaaaggcccctgttgagagcatatggacctcatcgataatgtagaccttgtgcttggctagactcggagcataggtggatttgtcgcgaatgtcccgaatttcatcgaccccattgttggaggccgcatcaatctcgatgacatcttctagactcccattggtaatggattcacagatatagcagttgttacacggctccccattgacttgattgggacagttcatggccttagcaaagatcttggccacactcgttttcccagttccacgaggtccagaaaagagataggcatggctgatcttgtcctgctccactgcctgtctcaaagtccgtgccaccacttgctggccgaccaattgaccaaaggtctggctacggtatttccgatataaagcttgatacattagttcttaactccaaacatcttaaagtcccagtttgtcttttcgatcaagagagcgacaaactcttccaaatactcttgatccagctgatcgtagtcagagacgcattctgagtccaggtctaataccccaaggagctgaccgtccttgaccataggtaccacaatttcactcatggcccggctatcacaggaaatatagttggcatgttggcggacatcatcgacaatcatggtttcctgcttttgagctgcttctccacagacaccctttccaagtgcgatgtggacacaagagacgcccccctgaaagggtcccaagatcaattctgactggtcatacaaataaaaacccgcaaagacagaacgaggcagggcttgatttaagagggcactggcgttagacaaattggccaaggcattgctttcacctgttaagagagcgtctaactgtgccagtaaaagttggtattgtgattctttttccgaatgtttcatacctttcattataccaaatctttgcccaaaaattaagcttcaaacagcgaaagaaaagagagtgggacagaaatcggtcattcgttagaattcgatttcgtcgtcccatctccgcacagttgagtagggctgtaaaagctgattaaatcagcgtagtagagcccactcaaccactgcgtcttgctcgacaatccaaaaacaattgagaggctaggacttttgtcccagcctctggaatatagataaactaatttttagtaaaataacttaagcgattctgcaaagagataaaaccgaggtctcattaatttaaattgatcaagaatatactaaactttccgctgtgagaaaagtgcctgaagcttaactgcttcaggcacacggaattattgagagtaaaacagtttgggaaactgttttagcctgagccaagaaattaaagagcgaaggggctcaatatgaattgaacacgggctgcggattgtgtcaaaaagcgcaaaatactttagtactaaatctaagacacagcagctgattgaattcttctctcatcttttagctcggaagaatcctaatcagccttgtgggggcaggacaacgaagcaatcccatacagcagtgcttctgtcctgctccctattttgactttatccgcagacgccctttgtatcttgatttagtcatggaacttcttcgaagaagttcgctgacgtccgcactcacctaaggaaagttttttatgatacctttatctattcatgcagccgattgaagtgaaagacttcaaaatattgaatggcccggtagattaaaaagatggtcaagatgatggccaccagccaaatcgtctttaatccataaaactggatcaagtaggtcgaaaaaatggccccacagacgaaactcccgatcaagcaggtcataaagatggcttcccagaggaatttcatctccctgtctctaacaaaatttccataagctaccatggttttcttgagatttccggtcataaaagagtggttgtaggcatagctacctacttctccaaatgaggtcgctacgattcctaaactcaggccaaaaaaaggcacgatgaagacattttttaccgatgctggcaaaaatcccgtcaccaaagttgtgaggatatagggcactagggtactcaagcgccagactgaattattaatcaagcgacgcaagaccgtcattaaaaagatccccagcataaaggccagcatcgtggctaacttcacttctacatctgagatctgctggccgatcaaaccaaccgaaagaaagaccacatttcccgtctggcctgccgccaaggtcccaccccgacaaataaaggtataagcatctgaaaaaccagcacacatggtcaataaacaagcgaacgccttggtccgcgaatgaaactcccttttcatttccattctccttaggaaaaagagggagtggtaccaaatgtttaaataaaacatttcccataccacccccacaaagttgattgagaactcttctgagtcttttagcgaatgaagagtctcatcaactactgagacattccgtcactcctcatatccgtagacacttggtgaccagttgcccttcttctctctttttctattttccttcacgcgcctcgttgaggattttctcaatcttggttgtgatcaagtcaatcgcaactgtgttggtcacgccctcaggaatgatcacgtccgcataacgcttggttggctcgatgaactggtggtacatcggttttaccactccaaggtattgctcgatgacactatctagactccggccacgctcctccatatcgcgcttgatccggcgaatgatccgcacatcatcatcggtatcaacgaaaatcttgatgtccatcaagtcccgaaggcgcttgtcttcaaggactaagatcccttccacgatgaaaacatcttgtggttcctgacgataggtcttgctgctgcgtgtatgctctgcatagtcataagttggaatatctaccggacgaccctccaagagttcattgatctgcgcaatcatcaagtccgtatcaaaggcaaaaggatggtcatagttggtcttgatccgctcctcaaaggtcaaatgactctggtccttgtaatatgagtcatgctcaatcatggcaatcttttcattcgggaaattggccaaaatggcacgagacacactggtctttccaccaccagaaccaccagtaacaccaataataataggtctattttgcattttctactccattacctctagtcgcctgagatataatagacatctcaaacacatcttatccattttaccatatttttgcctagacatgaatagtttttcattaagaagtttggaaacaaaaaggaccttgcggtcctttcattatttcactttttctaattttgcggcaaattcattaccaccacgtaagacaagtatattttttccaccgttgacaggtacgaaacaataatttgaattagcttgtatatagacttccttagcgctcttcacttgatagccttctgatttcaccgcttcttgaattacttcaaatgtatgttcgatctcttctttagaagtcgtgtctccatcatacttttctgaatcagctagagaatagaatgcgtaagccttgctatcgtaatacttatcactaataattccatgatctgaaatctgaacagttgtattatctccttctgtcacattcttccattttccaaccatggccttaggtgtttcaaccttgtgataaaccaaattttcttcaaagtttccttcgtatgatttataagttttcaagtcgaataaatcatttcttaaaataatattgcttccgtctttttggagcaagttatagcgtgtgttcccaccagacttaataacaactatttctgtcgtcttcaggttaaatttcttatcgacatccgcaagtgaatgcaagtccgtcgcatttaacaaagaaagtgctgtattaaattcttttttcgcttcattgcctttgagaacctttttgatggtctcgccaccattgactttttgtttctttccacttagttcataagtgaccggacttgaatccgtatctcgcaaccaaaccccatctagacttggtccacctgaaaagaaaaagaaccaagcaagagcaattactgcgacaagtcccgcaactgcgaccccaatctttgtttgtttattgaaagaaaatgtcaattttttcggtcttggaacaggttgcaaggttttcgccgatggttgtggttggacaaaagctgtctgctcttgtgaaagaggtgcgctaggtgcaacaggtgcttcctgagcaggagcctgcgcctcagttgctggagtcggcgcttcttttcgctctacgacaaactcccctttttcacgcgcttcttgaaattcttgcatacttggcttgcgaccattgatcgcttcaaagtattcaacccaatctttttgattcatcatatcccccttattgattcattataaaaactaaccatattataccataaatccatggtaaattttgtgattttcagaaaataaaagaaaaagcccaagcagttttccacttggactttctttattatttcaaaactttttgtgttttcgcgtaattggcttctacagcttctttttcagctttccaccagttttggttgtctgtgtaccacttgatggtgtcttccaaacctgcttcgaagtttgtgaattgtggttcccaacctaattcttcacgcaatttggttgaatcgatggcgtaacgcaaatcatgaccagcacggtctgttacacggtcgtaggcatcttttggttgacccattttttcaaggatcagttcaagcacttccttgttgttcttttcaccatcagcaccgatcaagtaagtttcaccgatacggcccttggtaagaatggcccaaacaccagttgagtggtcgttggtgtggatccagtcacggacgttcttcccttcaccataaagttttggtttgataccagacaagatattggtgatttgacgtgggatgaatttttcgatgtgttggtatggtccatagttgtttgagcagtttgaaatcgttgctttgacaccaaatgaacgtacccaagctttcacaatcaagtctgaagcagccttagttgatgaataaggtgatgatgggttgtatttggtttcagcagtgaatttttcaccaggaccttccccatgtccaggaagatcttcgcgcaatggaaggtctccatacacttcgtctgttgacacgtggtggaaacgaatgtcgtatttacgagccgcttccaagagtgtataagttccaacaaagtttgtgtagataaatggagatggatctttgagggagttatcattgtggctttcagccgcatagtgaacaatcgcatcagccttggcagccaatttgtcaactaattcagcatcagcgatgtctcccaccaccaactcgacacgatctccaagaatttcttcgatattggcacggttaccagcgtaagtgagtttgtcaaggacagtcacatgcacgtctggatggttgttgtagacatagtggacgaagtttgaaccgatgaaaccagctccaccggttacgatgatatgtttatattctgacattttttctccaaataattgttttttcttaatcgttccttaagtcaatctttttttagctttccttaggtgagtacggacgttaggtgaaattatccagtggatgatttcagcaatccaggaagttccatgactaagttttgagcctagtgtctcaaaacttccgagcacctgaaacaaaaatagttcaggtgcttttctcacggcggaaagctaagtatataactcgcttcgctcgtttatagcaaagctaaaaactatagaatgctttctttgattgtttaaagagctattcttacaaatcttctgcttttaggggtttgacgtctttgagcagtgggtggttcttgtctgcttctgagacttctgcttctaccaagttttcccattggatgtctaggcttgggtctgcgtagttgacaaaagcatattttggtttgagttccaatgcccagtaatcattgactaagtatgtataagcaactttatctgtcaaaacttggaacccattggctacaccacgagggacgaagatgccttttgaagcatcgatcacagtttggtaggtgttcccaaagctatcgccttcacgaaggtctacccaagttccaagaaccttgccttcatctgctacagagatgtacttgtcccaaggctctgcatgcaagccacgcaaaacatttttacgagagaatgaaatattgttttgcaacttgccttccgcaaagaagctttcagggaagccaagaggaagcattttttctttttggaagttttctttaaaccaaccacggttgtccccacgcacaggaatatcaaactccatcaagcctgggatggcttcaattttgcgtgctgctaattctttatcaaaaaattgttccgtcattaagcttctccaatcaaacggagcaaatattgtccgtattcgtttttcttcagtgattgcgctaattcatggacttgttctttggtgatataacccatgcgataggcaatttcctcaaggttagccacttggacattttgcaagcgttgaacagtttcgatatattgagatgcttgcaagagactttcgtgagttcctgtatccaaccaggcaaaaccacggcccatgagctcaacagagagatctccacgctccaaataagccttgttgacatctgtgatttcaagctcgccacgaggacttggtttgatgtttttggcaatctctaccacatcattgtcatagaagtaaagtccagtcactgcaaagttggattttggatgttctggtttttcttcgatagagatggcattcatatccgcgtcaaactctaccacaccaaagcgttccggatctttgacttggtaaccaaagacagtcgctcctttttccttcgcttctgcccgttgcaacatcttggttaagccatttccgtggaagatattgtccccaaggatgagggcaacatgatcgtcaccgataaagtcttccccgatgatgaaggcttgagccaaaccatctggacttggttgctctgcataagagagagaaattcctagttcagagccatctccaagaagctcttcaaaacgaggaaggtcttgaggggtcgagatgatcaggatatctttgatcccagccaacataagggttgacagcggatagtagatcatcggtttgtcataaatgggcatcaattgtttagaagccgcacgtgtcaatggatataagcgagttcctgagccccctgctaaaataatacctttcataatgttaggcctttctacgtagtcattacccttattttatcatgtttatataaaaaagtcaccttgcatttgtgttacaaggtgatgacaggagatgagtgttgtagaattgttcgcattggtcttactcatgattcaaatagattactgctccttgactgagccgtctgaaaatcttaccttgtagtagagcccactcaaccactgcgtcttgctcgacaatcaaaagacaattgagaggctaggacttttgtcccagcctacttcttcacatattgttcaactggataatctgctggatctaagcgcaggtttcctcctaccacgagttgggataggtgccacccaatgaggggaccagttgtgaggccagacgaaccaagtccactggcgacatagaggcctacttgatcaggaacagctccccaaaatggtgaaaagtcactggtgtaggcacgggttcccacgcgctccccgataacttctgcttgagctagttctggatagtaggccaaggcttctatttccatctgatttagcagagcttgatccaccgtcaggtcaaagcccatctcattttcatgggtggctcccatactgatcttgccctgctgaaatggaatgatatccagctctccttcaggcatgaccacaggataatcatcagtatctaggtctaactgataatccctcaactgtcctttttgcggacggacatcaacctggtagccgagtggcttgagtacctgccccaaccaggctcctgttgccaggatgacttgttcatagctttctcctgcaatctgatagccatcacttgagactgagaggataacctcttcctggaccactcttgccccacttgcctgaagaagggtttccgtcagaagagctccttctacatgggctccacctgatgcatagagcagcttctcaaaaccttgcagatcaggaaattgctgggctacttcttccttagtcaaaattgccaagtccccgattaagggagattcttctcgtcgactcagcgccaactgataaagttcgtctaatttttcctcatttttcttgaggagatagacaccggtctgctggtaaaaatctgtatgaataccgtcctttgccaggtcttctaccaattcttggtagaaatcagctcccagacgagccaggcgataccaggccttattccgccgtttagaaaaccaagggctgataatgcccgctgccgccttagttgcttggccaactccatggtcgtagacggtcacttctacctgtgcttctttagataaataataggctgcagtggatcccacgatccctgcaccgataatggcaactttcatcatgaccccttagatatggtaaaaaggattggtactggcttgactgccaatcacctcaatttcccacgcttcttcagccttccactgattgagcttttctactagtttcgacacaaagagaacctcgatatggtgccctggatccaaggccaagaggccatcgctcagcatgtcctgagccgtgtggtagtagatatctcctgtgatataaacatctgctcccttggcgagagcatccttgtaaaaggactggccacttcctccacagattgcgacatgcttgataacccgatccaaatccgcctgatcataactgactatgcgcaaagcatctaagccaaaggtttctttaaccttgctagtcaactgtccaaaggtttgagtagctacccgaccgatgcgaccaattccgagcccttctcccgtcatactgaggggttctgtatcttcaatgtccaagagctggcagaaccaatcgttgagaccatctggaacaatgtcaatattggtatggctgacgtagactgcgatatcatgcttgatcaaattgatatagatctgattttgagcccgatcagctaccaaatccttgatgggacggaaaatcggcgcgtgcttgacgatgatcaagtccaccccatgagcgatagcttccgccaccgtctgctcgcggatatctaaggccaccatgaccttatggatgtctttttgcaaagtgccgacctgtagcccacggacatctccgtccatggatagttcctgaggacagtaggcttcatagcgtttgatgacttcacttgctaacatgtagaacctccttgatgtgagcaatgcgctcttctaacgatgctctggcagattgattttcaactgggacctgttccaaggcaaaggctaatttctccacttccttggaccacttttggacaaaggctggagcttgttcctgcatcaaataaggaccaaaacgcagttccttggctgtcaactcctgagaaccctgttccaccacaaggatctcatagaacttctcattttcttccaagatagcttcatcaacaatgcgaaaatcatgctctactagccaagcccgcagttcatcttcccgattattgggctggaggaccaagcgagagacattggctaatttatcaagacctgccgctaagatatctgcaatcaagcgtccccccatgccagcaatggtaatacaggaaatgccatctgttggttcaaatgcagccaaaccattggccagacggacctcgatcttgtcctctaaaccattatccgcaacattttggagggcagactgatagggcccctctaccacttcccctgcaatggcagcctcaatcttaccttcctgtaaaagggcgattgggagataggcatggtcactccccacgtccaaaagacgcgctccagctgggacgaaactggccaccagattcaagcgatttgataattttgtaaattccatgtgcttctttctatacttttattccatcctatagtataccatgtttgcaccattaaaaaaaggcgcaacggcgccttgtctattatggaaaggtattactttagactttccttaggtgagtccggacgtcagcgaacttcttcaaagttccatgactaagttttgagtctaatgtctcaaaacttccgggcacatgaaacttatacgtttcatgtgctatactcacggcggaaactctcgctatcatcctcaacaagccgatattagactttagtcaatttccttatattctacttccaagccacgtttcacagctgggcgattggcgattttctctgtccaagcttgcaaatgcttgtattccttcacatccaagaaaatccctgcacggtcccagaccttgtcttgggctagacggccataccaagaccagatggcgatatctgcaatggtatagtcatcccctgcgatataaggtttggtggccagctctttgtccagtaagtccaaatgacgtttggcttccatggcaaatcggttaatggcatactcgattttctccggcgcatagtggaagaaatgaccaaagcctccccctaggaaaggtgcagcccctgtctgccagaagagccagttgagcacttctgtccgtttagccagatctgtcgggatcaattttccaaatttctctgcaagatacaggaggatattagccgattcaaagacacgaatggtttgatcccctgattgatccaacatggctggaattttcgagtttggattgatggctacaaagtcactaccaaactgatctccctcaccaatcttgatccgataagcgtcatagcctgcatccacacccagctctttcaattcctccagcataatggtagccttgatcccattgggtgttggaagggtatagagttggaaaggctggtcgccttttggaagagtttgttcaaagcgggcacctgctgttggttggttcaagccaccccaggctccacccatttggctcggtgctttccatacttctggtaattgatagtctgacatctttcttctcctttatttcgctactcctagcatatcaaatatcgagctccctttcaaagatctgctacgcgaaggctacttgactttttttgccaaaatgatagtatagaaaaaatacaattttaaggagaaaaccatgtccacgatcgattttcatagtttggcaaagacagaacttcactgtcacttagacggttccttatcgcttccaatcattcgccaattggcagctatggccaatattgacctacctgctagcgatgaggagctcaagcaccatgtcactgcgcctgcccactgtgagaatcttttggactatttggaggcatttgactacattcggcccctccttcaaactaaggaagccttgacgcttgctgcttacgatgtggccaagcaagctgctctcgaaaatgtcgtctacatcgaagttcgttttgcaccagaattgtccatggaccaagggctcaccgtcccagaaaccatcgatgctgtctgtgaaggactgcgtcaagcccaggaggaatttggcattgttgcaaaagccttagtctgtggcatgcgccagtccgatcaagatctcacatctcgcattcttgcagaagccaaccaagttagtgatcaggattttgttggttttgactttgccggggatgagcacaactactctccagaagatattcgaactctaatcgagcaagtcaagagttaccatcgtcatatgacgcttcatgcaggtgagtgtcattgcccacactttgttgcccaatcgattgcatttggcatcaaacgcaatgggcacgtgacggctctatctcatgaaccagccttactccaatcctttattgagaatggggtcactggtgaactctgcttgaccagcaacttacagacaaaagcagcgccgactatagaggatttcccttatttgaaaatgaaggcagccggagctcggatcagtattaataccgataaccggactgtatctgataccgatcttaccaaggaatatgccctctaccatcagcacttccaaaccaaggaaactgacttttaccaacacaatgtccatgccatccaggcttcctttgctagtgacgaggagaaacaagaactctttaccaaactagaaaaagcctatgaggactatttataaacaaaaaaactagcactttatgagtgctagctttttgaatggttaaaaattaattttttaattaaggacctatttgtttcagtaaaaataatgtcttatttttaaaactattcaagtataaactaaaaactttccgccgtgagaaaagtgcctgaaacactattgtttcaggcactcgggagttttgaaaccttaggttcaaaactaagtcatggaacttcgtagaagttcgctgacgtccgcactcacataaggaaagtttctaggaagactttaccttccatctgcaactagcactcaaataagtgctatttttttttaatccttccacaaatccatagccttcaagaaatcatctgaaacggtcacattgcgtgggttggcttgctcacgttcttgtaatttcgcctctacttgggccaggctgttgatgccttcactgcgccagttgcgtaaaatagcttggatatatttccagtgaggcttgccgttaaagacagcttctcgtaaggctgccttgatcacgtctggatctgtctgatcttcgcggacagttttggtcaggtcttcaatttcaaaaggtgtcaagagacgtcccagttcttgttggaaggtttccaccaagtccttgatgacatttcctttagcaggcgcgctctgtgtcttcccttgtatctgggcttctaaaatctcatccaagcgctccagggcaatggtcgcatcaaagatagcttcaatctcgccattgagctcaatggtccgatactgaagaagtcccttggtggttaaattggacataatccgattgacctctgtcaccgtttttcccagatgactagcaatctgattaggtgtcaaagcctcttgaccggtcgtattttgtagaaagaaaaactgccaaaccaagtagtcatctgcttggtcaaacaattcatgataatgaaaaagtaaggcactcggaagaaccaagttgccatacttaaatgcttgtgaatatgtcataattcccctttataggtaaccataaaatgaaatatctttttccaattcttccaagcggtaaggtgtttcttgataaaccgcatagttgatccaattactaaaaaaggtcgtcgcagctaaattccaacgaatgcgaggctctgtgctagcgtcatccccatcaaagtaattcttaggaacatccggatccaagcccgccttgacatctcggtggtattcttttgccagcgtatcgcgatcatactctagatggccaaagctatagacctcacgcatgtctggactagcaatgatggaaagcccaacttcatttccttgagcgatcacttgaagattgctcttttcaaggacttccttcaaaggaatatctgtataacgagaatgaggggcaaggaagcgatcgtcaaagcctctcatgagcagactatcgggacgcaccactgcttggtcatagatacccgatagcttgtcacagagctctactttttgaatcccgtaacggtggtacagtccagcctgggctccccaacaaaggtgcaaggtcgaaaagacatgacgcttagaccattcaaagacatgggtcaattcttcccagtagtctacttcctcaaagtccatcttttcgacaggcgcccctgtcacaatcaagccatcatagtaattatccttaatatcctcaaaagtcttatagaagctctccaaatgctctgccgctgtattcttggattcatggctcgccatatagaggaaatctacattgatctgcaagggcgtgttggcaaggagccgtaagagctgggtttctgtcgcaaccttggtcggcatcagattaagaatgagaacattcatcggccgaatatcctggtgagtcgcccgaacatcatccatgacaaaaatattttctgaacgaaggatatcgactgctggtaattttttatctagagtaattggcataaaaagctcccatcttacaagttcttaactaacattatatgataggagcttatagttttcaattatggtttttctgtagccagttatagtattagactatattagtaatgcatcaagactttgtagtcgtaatcgccgatcgcttcgcgacctttcaattcatccaactcaatcaagaaggcacaacctgcaacgaccccaccgagtttttcgatcatttcgatggttgctttcaccgtaccaccagtcgctaagaggtcatcaacgatgaggacacgttgacctggtttgatggcatctgcgtgcatgcagagggtatccacaccgtattctttttcgtagtcagcagaaataacttcacgtggcaatttaccaggcttacgaacaggcgcaaatccaattcccaactcaaaagcgaccggacatccaacgatgaacccacgcgcttcaggaccaacgatcatgtcgattttcttatccgttgcgtattgaacgatttcacgaatcgcataactataagcattaccatctgccatcaaagggctgatatcacggaaggtaattccttcttgtggatagttttcaatgcttgcaatgtaatcttttaaattcatggttaactttctttcataaaaaattttttacattccattatatcatgaattctactaacttgcatcattttttgccaaatcattttcccaagctcccgcgtcaaaagcaaaaatcccacatccgaaaaatgatgtgggattggaaacatgcttactattcatctaatactttattgtacttgattttcatatcccctaagtttttccaagagtaacgggagcttccattcttgaaccaagtaccaagaatatattgttcagctaccttcttactttgctttttcaaccaagcacggtctttgccataggcggcaagtttctttagaaaatcactaccctctacttcttgatcatccgcataaagatagacttcttcttgaatcaatgctctgtttttagaattgtatttgaacatcatacgaaccgatacattttcttttaactgatatttatacctataaacccattccgaactgtttcgaaacatcatgacggacaggtcttcttgtcccccaacgattttatctgaatagggatacatttgaaatccttcatcttccttccagatgcgatcacttccgatcgtttctgtaaatggcttaaacatcacatagcgcatcaatccaccattttcagagtagttaatctcctccatagggtttttgaggctcaggtagattcctacccaataaagtccaaaaagcaggaagggactgagccagaggaatttttttaggtgttttttcatgagtcctgtcctgtcaggtagtcgtagatttcgcgaaccgttccaagggccatcaattcctgttctttaacggtttgtttgagattttggtagatgctactttctgcgatttcgcgtttttctgcttctttattgaccttcatgatgccattttcaatggtcacgaagcccaactcttgaaagatctgaatcattttgaccaagaggatctgctggatcttgagataggccgctaggtctttgagtttgtagcggacatcgaactctgggtactggtagatggtcttatagagcttggcatattggtccctgctaccatatcctgtcagatagtaggctttggcgatctcatttttgaaatagacagcctggaaatcatgctcttggaagatttgccgtagttgttctaaatcctcagggatatttccaactacaaccgcggatgtccctgtcaaatctggcagttctttagtaaaatcaagaatgggaacacctgcggggaggctggcatttttagagcggatattaaagagctgcacaccatccacacgcgcatcaaccagcatgagctggagggtcgtttgaccattccattggttgaccgacaactgcacagctagctctaggtcttgcgcttgcgcaaactctgactctaagcttcccaagccaaaggcaaccacctcaaaggtcgcatcttcttgagaaattttgagtttcaagtgggtattgccagctcccatcgagcgtgccccttctaccttgaaattacggactagaaagacgggctttttattgtccatgccaaatggactcaagcgatcaaagcttttcaaggtctcaagcgttagttctgttagatgcagttcctcgtcgatggctagggtggacttgctgctgagatcaatctcttgctctgcaatgtaatccgtaagagcctgagacagggcaggaagttggtccacctccagcgtcattcctgctgcaccggcatgtcctccaaaggcgacaaagagcgaccggtgaggatcgagggcctcaaagatattgaccgactcaggactccgagcgcttcctttagcccgcctatcttcaatacttaaaacaacaactggctgatgaagctcttctaatagacggccggcgacaataccaaggacccctggattccagccttccttggctaagacctgggcggataagcttggatcgaccatggttttggcttcgtcatagatagcttggacgatctcttttcgttcttcattcttttgatgaatcatgagggcaatctcgtgtgcctcttcatcgtcaaaaccagtcagtagttcgatagctggattagggtcatcgaggcgtccaagggcattgagacgaggagcaatctgaaaaccaactgtttcttcattgacatcctccggacgaatccctgcgatctccaagagctcctgcaagcccatgcgctgggtatgttggagaacacccagaccgtatttgaccagaatccgattctcatctgtcaggctcaccatgtcagcaatggtcccaattgctaccaggtctaagagatcgactggtacttcctctaggagggcacaggccaacttaaaggccacaccacatcctgctagataatggaagggataatccgcatcaggatgctccggatggatgatcgcataagcatccggtaaaacctctggcatagagtggtggtcggtcacgataacatcaactcccatcgcttgggccatggcaattgcttgattgcccgcgaccccattgtccaccgtgacaatcagggaaataccttgctgctcgataaagtatttgtagacactctcattgggaccgtagccgtctgtgaagcggttgggtaggtagacttgcacctctgcacccgtctgctccaaggtttccttcataatggaggccgaggtcatcccatccgcatcatagtctccgtagatgaggatctgctcataatcttcgatggcccgtcggatgcgccccactgccttgtccatatcatggagcaaataagggtcgtgtagcttctccagcttgggttctaaaaagtcttctaaatcctctttggtctgaatgccacgctcatacagcaaggttgctacggacgcttccaggcctgcttttttggcaagggctaaaaaggcctcatctgcacttggtgaagctaactgccaatcgtattttgaagtgatcatctagcttttggtctcctctttttcttatctgaatattataacatgaaaggctaaaatggcgggaaataaaaggtcgacttatacaaaaaccaaaatcaacattttgccttatttttgttgcatttaacttgacttatcacactaaaagaatataataatgttgataataatcttttaaatatgcaatgggatgattattctgttaagtttgcactgcttattatcattttatattatgaagcgtaaatttcttccgtttttctatcgaatcattgtttttagaaagtttgtttcaggtccaaccaatcctctagtatggacagactaaagataggatattgaggtatgcccccatattttctcaatagaggtaaggtccttcttctctaaatacatgttcaaataaagcaactgattgtatggagcaaagatcaggagtttttcagttttaggagatatcactatatagaaaaactttacgaaatttatgcaaaagaaaggaaatgaggccaattgaaatttctatataaaaagatagttgcatttgtagctatcatcgccgtggtagccttaggcttgtctgtgatcaaacctgttagcgcggctactgtttcaccaaccgtcaccaatttaaaggctcaggcaagtggacaaaaagttatcttttcatttgactgggatttaactggtaaatcagttaaagaaggtgatacgtttaccattgatgctccagaaggtgtcaatatcactgaaatagcaacgcaatcactccaagcaaatggagctgaagtcgcaaccatttcgatgacaaacaaaaagattacttttacttttaaaaaagccatcgaatccatgaaccaaaacgttaagggtggtttctcatacaaagcagaatgggataacactccgggaaatcctggaaataaaacggctacctcaaaagttggttcagaatcagtcgtcatcacacgtcctgatgggccaggagttttcgaagcaatcttaaataaatataatcgtacaggtgattatgtttctaaacaattcaaattagacgcatctgaaaactatgcatggatgaatgttggagatgactattatctcactacttggttcattcgtatcaacggagatggtaagaaacaagccatcacaaaccctgttgtgtcagataaaatccaagctccagctgtagattactcaaaaatcacttttgctcctgctgcaaaccacgctgcaagtgaattctttgtaggaacttacttgaaaccatccttcactttgagaaaaggtggacaagtggtagcttctggttgggacttctggaaacatgtgaaattcgatgcggacggcaatggatttaccgtgaatttatcagatgtcagtgatgtctttaaaacagcatcaagcgatgaattgatcgttgaataccaaacattaattcctaagacaaccgttcgcgttgacaacaatgctacgttaacagctgatgaaatcaaaacaccattaaaagacccagcattctggaataacacagaattaaacttctgggtatccggtgataaaactataactgttcaaaaagaatgggttggtgatgaagaagctgaccgtaaagatatcacagttcaattattagctgatggtaaaaaattagacggtatgactaagaccttgacaaaggcttcaggttggactgcagaattttctaaattaccagggattaaagatggacaaccgattgtttattcagtagaagaaacgaatacacctgatggttatacttcaaaagttgaaccaatcaatgagtcgaatgttattaaagttgtaaacacttcaaacaaaccaaaagtaactgaaactactgcaaatcttgttgttaaaaaagctttcgaagtagccggtgatcaagaacataaacaagttccaatcacagaaggtcaatttgagtttgtcttgaaagatgaaaataatacggtagttgaaactgctaaaaataaagcagatggcactgtcaacttcaagtctctaaccttcaataaggaaggtagctatacatacactatcactgaaaacaagggtacggatgctactatcaactatagtacacaaagcatcacggctactgtcgatgtgaaaaaagaaaacgacaaactcgtcgctactgtcacttactcaggtggagatggtgaacaaaaaaatacgatcaccaatactcaaaacaaaccaaaagtttcaaatgctaaagtgaccttaaaccttaaaaaagcatttgaaggtggcgaacttaagggtgatgactttgagtttgttgcaaaagattcaaacgataaagttgttggcacaaccaagaacaaaaaagatggttcaattacttttgataacatcactgtagaccatgctggtacattcaaatataccatcactgaaacaaaaggtagtgacaagaccattacttacagtgataaaaccatcacagctactgttgtagtggttgaaaaagacaatgccttggttgtagaacaaatcagctactctgatggtcaaactggcacagatacgttcaccaacaaaaaagaagctcctaaaacagaaagtacaacagctacacttcaagtgaaaaagctccttaaagaaggtgaagcaaccttaccgttgacagacgatcaatttgaatttgtcttgaaagaaggaaacaatacccttgaaactgccaaaaacaaggcagatggttctgtaacctttaaggaactttcttatactgcagaaggaacacacacctacaccatcaccgaaaacaaaggtacggatgcttctatcaactatagcacacaaaccatcactgctaccgttgaagtgaagaaaacaaacgacaaactcgtcgctactgtgacttactcaggtggggatgctgaaaaaggagatacgtttacaaatacgaaaacacctccaacgcctgttcctccaacagtgaaaccaacgacagctcaattcaaggctaaaaaagtattggcaatcaatggttcgagcgatcgtacattgaaagcaaatgagtttactttccttctcaaggatcaagctggtacgctcattgataccaagacaaatggtgagaatggggatattctcttcaatccagtaagctttaatgaagctggtactttctcctacacaatcgttgaacaaaaaccagctacaccagaatcagcgatcacttatgatgaatctgttcatactgtaacagtgactgtcacaaaggatgcaactggacaattgaatgcggatgtgcaatacgacggtaagaaagatactcctacttttaccaacacgtatactcctccgacacctccaactccaagtgaaaaacaaattaccacaagcaagattttagaaggtcgtgatcttcaaggtggtgaatttagctttaacctcttggatgaaaatggaactattcttcaaacaaaacaaaatgctgctgatggtacagtgacatttgatgcaatcgcctacacggaagcgatgattggtactcataaatataccattaaagaagtcgtaccagctgatcaggcaaacatccaatatgacgaaggtcaagtggatgtcacagttaccgtcacaaaagatgaagcatcaaatgcgatccaagcagttgttgcttatggagataagaaaacctttatcaacaaggtgattccaccaactccaccaacaattgatattcctgaactgaaactctacacccttaaggttcgtaaagtggatgaaaagggtgattaccttgctggtgcagtatttggactctttgaagcagatggtgtgacacctgttgccaacccatatggacaaggccaagcgcaagcgatttctggacaagatggacttgcaagctttgttggatttgaagctaaagagtatgtcatcaaagagctctctgctcctagtggttatcaactttcagatacagccatcaaggtttctgcaagtgactttgcttcagctacaaaccttgtcgttgataaaggaaacgtggtgaataaacttcttccacctccaccatcaacagatattccaaatataccaacaccaagtaatagcaaacctaaaactccatcaccaaatggagataagcctaagcctagtgacaaacctaaatctagtgaaactcctaaatctagtgacaagcctaaagaaagtaaacgatcccttccttcaacaggaacggaagatcatttaggacttcttgtaactggtttgacattcgtcgctacagctattgcttctatgacacttaagaagaaggaagacttctaagcaacatgaaagatctagtcaaacatgactagatctttttcttgtattcggttactcaattctgaatattttgatcttcataaaaaataactttcccatctttaactttgaatgagtaactgatggaatcagcataactacctttggaatagtagaaatcataggctccatccggtagtttgctagcgtctaattttttggctgctgcttttaagtctttttccttaacggatacaccatcctttatataaatggtcatagtgattaattcttgatcgattaaggtttgaaaagggatttgatagtaaccagcaaagtcctttttcccttctttgagattttgacttgcgatactatctagaatttgctccttctcatcacggttggagttagataaaaaaccaaagaaattaataggaagacctagagattgcttctttaattgactctcaatttccttctccttcttttggacagattgctgcttcaagtacgcttccttatactctggaaaatggtcgctagttgtatctgtccaatcattatgaaacaccgtatccgtttctaatgtcactgtttgtccatcataggttttctcagagtaggtataagacacatgataagttgggatttccaaagcagtccaatccagtttgtttatggccacatccccatgcagaccaaccttagcaagctcactgctgacaacttccttcgcttttttataatcactcggtttcatgatcttacaactggaaagaaacaggcaacaaagaataagtggaattcctgcgaatagtttgaaatagttgggcttcatagcctgacctccttgctaaatccgacctaatcgattaattttttacagcagtcatatctgaacaacctatgaaccgattgaaaattctaatgataattgagaagttcctattatatgacatgactatttttgaacgacccattttgcatcaccataaacaaccgtaaatggtccatccccatctgttaaatagttaattttatatataccagattctcctgcttcaaggactgttggctgtttgtaatttaaagtattattcagcatataagcagatttgccatggccatcatagagatctacatttgtataatctggagtattttcaatactgagaggtgttgtatttgatagggtgaattcgacgatcaatcgatgttgttttttctttgtatcgatacggtcttgatcatcctgaacatccaaatttggatcgtctgttacactattcagtgtaacttctaagccattagcaaatagaactggctctccaatcgcatagcttttaacaggattttttgggttaaaattctttaatttttcttttaccttttgtccatcactattatttccagatgggatggtccaaaagatattattctcatcttgcttaccatactgattatcccccttcatttgttgagggatttgtaagagaatagccaagttttttaaatcaattcgaacatcaccttgatttgtcacttccatttcaaccgtgaattccgtaggcgaagttttactatcagcataaccggataatgaggttgcctcgaaatttttgttaactaactgttgtaaaactgttgaaagcatgatataggaaatatgatcatcacgatttgtttctttttcagcatacctttgatggaattcatcgagccaatcatagaaggcttgattgaaatctgactcattaggatttttataatatttattccctctcgataaaagctctgggaagtaagttggtacctgaatgcgaatgaatactttgtttcccttaactgcatagccctttaactcatatttttttccaaagctcaatgcattcgtcatgagcttcaaatacatcggaccatatattttgagggggtacttctcaccaagatattccacataagtatttggatcaaaagtactactgtttttttcaattttagggataatataatcgttccagagtcgagtatacatatcttcttgattttttgccccattggccttgattactgtgtctattctactttgatctacatagactccttcaacgacctgcaaagctttttgaacccttccttcctcagatagagaggcttcattcggttgctgtccatatattgaaataccatcgctatcatctgacctcatatattgtggaagtttttcaaacgttatgtatctgatactgttctttgcatcccaatcaaatgttgctgcaggtcctgtcttgtcaaaatgaatgttttttcgatcgattttcttctgtacttctttattcgaagaaccttgtttttctacagttccttgtttgcaggcactcaaacatactggtataagtaccgaacataagacaagtccccattttattttcttcttcattccatctcctcctaatctcatcctcattttaccatcaatcaccccttttgtcagtcaaatagataaggctgggacaaaagtcctagcctctcaattgtttttggattgtcgaacaaggcgcagtggttgagtgggctctactacgctgatttcatcagcttttacagccctactcaactgtgcggaggtgggacgacgaaatcgaattctaacgaattaccgatttctgtcccactctctatttcatataaatcatccctgtacaggcttgctctgaaagttcgacaaagccgagagactggtaaaaggctagatttttctcgctacgttcagtgacgaggagccgttgatagacagtagggaaggtcgctaaagcctctgttaagagtttctttccaatgccttgacgctggtgatctggtcgtaccaaaaggtcctgcacaaaaatgacagagtggccatcacctaccaagcgaatgtaagcgataagctctttctcatcatagacggccaactgccagagactggctttgacagcttgttccaacatagctgggttgttggtataattggtccaaccaaccgagccgtagagtgcaagtaggtctgtcatcgctggaatttcttttttataatctaacatcttaactcctttttaaccgatagtgctggaagaaggcgatatcccggtaaggggactcttggcaaacagctagctccatcttgagcatagactctcgccagccttcttggcccttgaagcggttgtcctgcaaggcataaaagacacggatcccttggtagtcctgaacttcgagggctagatcgtctactgctctatctagatcataggcctgtgccaaacccatggagtgggtttccagatcttgacctgctaggagatcaagcgccttctgagtatcattttcaaagacgacagtctgcaggacgcggccgacctcattatgcttgacgatagagagcaggccacctggtttcaagagacgagtgaattccttgagaaccaccttgcgatcctctacatactccaagacattgtggcagaggatgacatcaaagctggcatcttcaaagctctctatctggtccagacttctgacgagttgctggtaaggatggtcctgggcccgcaaagccaccatttcctcattaggttccacagcaaggacttcattgtcttttgccaagtggttggccacgagaccgaagccactgccaaaatcaagcactcgcttgcctttgatgtccttcaattgttcaaaaaggatatcataatagatctgtccccagggttgctggaggttttctaaataagcttgaatattcgctgccatctatctcctcctatttgaaattgaacatcttgcaggctagcttgtccgagatgcgagggaaaagggtatagagcttgtgggtcaggttcaaaagccaaggcaaattgagctcacgttttgcttttccaaagtttttgacaattttattggccacaaagtctggttccaaaatgtagcggtccacagctttgacatagcttccgtctgggtctgcctgatcaaaaaaagtggtccggatggggcctggattgaccgttgtcacatggacaccaaagggcatgagttccaaccggagggcattcgagaagccaatggccgcaaacttggtggccgaataaaggctggatttggctgttgcaacgagacccgccatgctgacgatgttgacgatgtgccccctgcctgcttccttcatgtgcgcacccatcaagcgtgaaaactgcatgagggcaaaggtgttgacctcaaacatctctcgcacctgctggtcagaaatgctatcaaaggcctcaaaaatcccatagcctgcattgttgaccaagacgtcgatctgtccatagcgctgatagagctcttcgacgagcttttggatagctgaagaatccgtgatatcaagcccgatgcattcggcttgaggatgactggcatagagctgtcccagtttttcttgatttctacctaggagaatcagccgatcttcagaaaggagcttgaccatttcttgggccaagcctccacttgctcctgttatgagaatggttcgcatattagatctccacttcttccaaatctttgacgacatagacattttcaaaaatgctggacgcatccttgcgcaattggctgatgtcttttgataagaagcgagcactgatgtggttgagaagaaggcgcttggctccagcttcacgcgctacttctgccgcctgcatattggtcgagtggccgtgtttacgagcaatcttctcatcacccttgccataggtagactcatggacgaggacatccgcattgactccaagtcggacgctggcatccgtctttctggtatctccgaggatcgtgataatcttaccaggtcgaggggctgaaatataatccgcagcaatgatcttagtgccatcttccagggtgacatcttgtccatttttaacctggccaaagagcggtccaaatggaacccctgctgccttgagcttgtctgcgtcgagtgtcccttccaagtccttctgcatgatccggtaacccacacagaaaatggtgtggtccaaagcctccgcataaaccgtgaatttatcggtttctaaaatcttgcccagagaatgctcatcgaattcatgaaaatggatgcggtaaggtagccgagagcctgatacgcgaagactagtcatcacaaaggatttgattcctactggtccatagatatctagatccgtctgctcttcattggcctgaaaggcccgactagagaggaaacctggcaaaccaaaaatatggtctccgtgtaggtgagtgataaagatcttgttaacctttcgcggacgaatggtcgtttctaaaatttgattctgtgtcgcttcgccacaatcaaagagccagacttcattgatctcgtccagcaatttgagcgctaggctcgatacattacgggcttttgagggttgcccagctcccgttcctaaaaattgaatgtccattgtctactttctatctatataaatcatggccgtccggttctctgaacggaaagaaaggtcgcctgggtaggcttgcactagctcgaggagctcttcttggttatatcctgacagtttcaagcgtccatcttccaaggtcatcaagtcagtcagggcagagagggcttctgttttagtgaccacttctgggccggcctcttgcagacagatcttgccatctttttcaaagaccaaacaatgtggaaagatctctgcaatttcgaataaaatggcaggggtgatatcctctgttggatgttcagcaaagacacaggctagctcttcatttgcgtaggccaagccataagacttacctgataaattgaggcggataaagggcttccattcatcaaagctttgctgaactgtgaataagtcaaatacccgactcaagtccaagaaataatccatggcctccttggggctcttcttttgatagagctctgcgaaataggcgttgaacacacttgggggaggcgtaatcacacggagacgcaattcctcagggattgtgtttaaaagattggtcaggtagacccgatcgaggctggtatagcctccatattttattgctaaatcaacgtaatccgtcataaaattcttccaacttccacttatttttctctgcgatatagccttgaatgacctcgacatcctcttcaaattcacgtttgtcaatgatcgctactgtttctagatcatgtgtccgataagattttgaaaagggaacgcgaatggcaaagggaacaaagagctctctcagtttttctaggagcaaagcctggagatcttcacgggctgtctcagagcgcgctgaaatcaagctaaaaggggtctgggttggtgtaaagtctgctactttgtctgctttgttgtaaagagtcaagcgagggatttccagcatatccaggtccttcatgatcgaaagcacggtcttttcatgctcttcatgattaggatcagatgcatcgatgacatggaccaggaggtccacattcttactttcttccagggtcgacttaaagcttgataccaactctgttggtagatcttggataaagccaaccgtatcggtcagcgtcacttgcagattgcctgttagatggatgctcttggttgtggcatccaaggtcgcaaagagttcatcggcttcatactggctcttactggtcagctgattcataatggtcgacttacctgcattggtatagccgatcaaaccaatcttgaaaacaggtgattccaaacgtttttcacgaagggtttcccggttcttttcaactgccttgagctggtgctcgatatcggtgatttgattgcgaacgctccggcggttcaactccaactgactttcccctggtccacgagaaccaattcccccagcctgacggctgagcatgatcccttgaccgacaagacgtggcaagaggtatttgagctgggccaagtgtacctgcaacttcccttcatgacttctagccctcatagcaaagatatctaaaatcaactgcatccggtcaatgaccttgaccccaaggatttcttctaagttgacattttgacggggggttaggcgattattgaccaccacggtcgtaatctcatctgcttcgaccatttgagcaatttcttcgagttttcctgagccgacaaaggtcttggtgtcgtatttctcccgcttttgtgtataggaaccccggacatctccaccggctgttttagccaggctcgccaactcctccatagacatgtcaaaattgtccatgccttgaagttccacaccaaccaaaaggatgcgttcttgttttttttctgtttcaatcatgctgtaaaaactcctttacatctgcaagaacctgctccttgaagtggggggcagaaatggcgtaaaattttacttccatccgatttcgaaaccaggtcagctggcgtttggcaaagcgccgcgtattgcgcttgaggatctcactggcttcttcaaggctctgctctcccttaaagtaaggaaagagttccttgtaaccaatccctttagctgcctgaacctccggatggtcatcatagagccaacgggcttcatccagcaagccttcctctagcatgcgatctactcggcgattgatgcgctcatagatcaaggaccgttcatcatctagacagatgagatagggttcataatcggtctcttcgtttgcaaggtcctgcccaaaatgcgcaatttcaagagcccgcatggcccgacggcgattgagctgaggaatcacaagtccttgctccgccactctttgatacaagtcttcgtccgacaacaagtccaattgagcgcgataggccagaatctcttcatgaggaacttcaccacctaaatgataaccttcgagcaaactttggatgtaaagacccgtcccacctgcaatgataggaagctttcctcgagctgtgatatcttcaatggcagtcttggcttctcttacaaaatcaaaagccgagtaagactcggtcacctcccgtacatcgattaaatgatggggagctgcagcttgctcttttggtgtcgccttggctgttccaatatccagcttgcgatagacttgctgactatcgccactgataatctcaccattaaaggcttgagccaaatcgatcgcaagagctgtttttccaacagcagtcggtcccacaatcacaattatcttggtttccatcgtttttccttgcaaaattcacgttttttcgttaccatatattataacataaatatttaaagttcagaaaaggagaaattctcatggctaaaggatttggtaaaggttttgttactggtgttgctggtacagttgctgctgtcgcaggtgcagtttacacattcaagaaaaaagtaatcgaaccagaagaacaaaaagcagctttcatcgaagaaaaccgcaaaaaagcagcacgtcgccgtgtctcacactaatccaacaaaaagctccgggaaaccggagttttttttgctgaagaaaaagtccattttggaaaattttcttttactggtagggtttgtcacgatatgctaacacaagtaatgctaaaaaaattagaatgatatatattatgtttgattcaaacatatactgaaactttccgccgtgagaaaagtgctagaaacacttttgtttctggcactcgggagttttgaaactttaggttcaaaactaagtcatggaacttcgtagaagttcgctgacgtccgtactcacctaaggaaagtttctatgatgacgttattcttcaatctaaaaactccggtttcccggagcttttagattgaaatttcaccgttctttgatcatcttcgttgcgatctccaagagctccactcccatctgaaaatgctcgtctaacaaatcatagacggcatcttcggacaagacaccacaaggtagatctgctggaaagtcagcctgattggacaagtccaaatcatcaaaataaacctgactagtataataatcacacagttggatatagctttcttgatgctctcttagccgatccactgcttttttggtttcttccaaagttttggcatagtcattcaaatagctttccattttttggatccgttcgatgttttcctgtgcaattgccatgatttactccactttcaccacttctagatgggggccacctagaagcacgagatatttttctacttgctttttgccataagaacgacgaagagcttctgcatagagatcgagctgatcccggtagcgttcgaccaattggctaggaaccttgtagtgatccgtcttataatcaaagagcaagatccggtcttctagcaccaagtaaccatccaagatcccccgcacgacaaagtcctcaccactagctggatctttcttcagcatggcaaagggagcttcgcgacggactcgagaggcttctttttgaagcaaggtccccaaaggcgtctcatagaaagcaaggatggcctctagcttgatacgggctttgaccgctggctctgcttgaacttgctccaaggcttgacgcagtgtatctagcgtgatttcttcttcaagaggcacgcgctgcatgagttcatggacagcactaccgacctgggctcctgtcacggctttttcttgaccaaaagttggcaactcaaactcaggcgtcacagtctttgcatccataatctggacgccattggcatccatgaccggctcgtagaatttcttgatctgactaggagtacggacacttggcaaatgaatggccggagcatagagctgattgagacgatcaacattttccaagatatccaaagcccggcgaatatcctctgactggcggacatccttgagctgatcgaagcggaaatccttttccttctctagtggctccagttggtccggtgtcaggtcttcgtctgtcacaaaacgcgtgtcataggccagggtattcttggtaaatacatcttgaatagcaaagagccagtcctgataagaggtccattcttttcgtttttccggatccaatttgccattgcgactggtcccccaatcagtatcgcgcagtttgtcctcacggccttttccgactagatagagcttgagctcagccctcgtcatcgcaacatatagaagacgcatctgctcagaaatcgtggccaattttgtttcttccacattgcgttggtagcaaggcgtttcgatctgcaggcgaatggtttctggagcagcaggattctctgtctcaaccggcaggttcgcaacatatttaaagccaatccctttttggcgactgagaatgattggccctgattgatccttacggttaaaggccttgtccatattgagaataaagacatacttgaattccagccccttactcttatggacggtcatgagctggacggcatcttttggcgccgcaagagggacgctggccaaatcgtgttcattttcgatcaccttgtcaatcatggcaatgaagcgcgacaaacccttaaagctggctttttcataatcattggcccgaagcgtcaaagcgtagagattggcctggcgctgggccccatttggaagggcgccgacatagtcatagtaatagcgatcctcatagattttccacagcaaatcatagagagaatgggtcttagcagcagcccgccaagtagataaaactttgaggaagttctcgattttagctgagagcttggcatcgatcaaccgtgcctgctctgctgtcttttcaagggttaactggaccttgtgatagaaagccacttgctttttctctggaggtgtctgtaaggaaatccgtgccaattcatcttcatcaaagtcaaacatgggggatttcatgagagcaaccaagggataatcatgcaagggattgttaatggtgcgcaaggtatccaacatgaccatcacttccagtgactcaagataatgcgcctgtccgctatctgccacaatcggaatatggtactggtcaaaagcttccagaatcgcatcatttcgcgttcgagtcgcagtcaagagcgtgatctctttaaagggcactttttctacccgatggagacgtaaaatttctttgatgaccaggagaatttctcccttggaaatcgtctcgactccaaggggagcttcctcgtcttcggtcttttcttcctggtcttgggagccatcatagagcaaaaattctgcccgatgttgtggaaaggctatccgctgcttgtcacttcctgctactagatagtgggtttgattgtagtcaatctcgcccacctcttcgtccatcaaatggcgaaagacatcattggtcgcgtccaatacctctacatgactccggaaattttccttgagcaggatcaaccgccctttcgccccttcttcttggtaggccttaaatttgtcattgaaaatctgtggatccgcctgacggaagcggtaaatggattgcttgatatcccccaccatgaagcgattgtggccatttgacagcaaatccaacatccgctcttgggtgtggttggtatcctggtactcatcgaccatgacctcatgataacgctcttgaaaggcttgtctcacctctgggaattgctctaaaatttgaatcgcaaaatgactgatatccccaaattcataagctttttcttggatttttcgctccaagtaagcgcgagcaaagtctctgataaaatcccggagcaaggagagcatgggaccttcttcttggtggtaggctcgttgaaattctagctgatagagctgattttccaagtctctgaggcgattgatatgtatggttttgtcttggttataagccgtaactaggtctttcagttcttccttacgggctctattggtcaaggctcccccatttgaagcccgactaatcgccacgaccgtctttaggacagaggtcagttgctctttattggtgcgacctgtcaggctaccaatctgatcgagcacctcttctacagcttccaaatatttggccttgccaaatgcttgtccctcattggacaaatgaaaggcaaaaaagctttctgcatcataaagggcctgctggatgctctccatcagatcgccttcaacctggtcaaaatcggtctcttcataaccttttaggaaatgctcctccaaccatttctccggatcactggttgactgaagaaagtcatagatctggtagacctgctctttaaacaaggtcaaatttttgcgctgccctgtgaaattcttgaccatctgcacaaaggcttcttggttttctccttggtaatagcggtcaaaaacagcctgaaagacttcattttgtaagaggcgttgctcactagcgttttgtaaaatcctaaactgaggcgccaacccaagcaaatagccatagcgcgttaggaccttttgggtaaaggagtccatggttccgatatcgctggtggcgacatctgcgatttgacgggccaggtgttgcttgagttctgggtcatcgctcgcttgcagggcttttccaagttcactttccaaacgctccttgagctctcctgctgccttgaccgtaaaggtcgagataaagagctccttaatcgaaatgccacgctgcatctgatccagtatccgctgcaccatgacaaaggtctttcctgatccagcagaggctgacaccaagatattggtccccgaactatagatggcatcgatctgttctggtgtccgcttttgctctttggtagaagctgcctcttgggcctgaagggccttgatttcttctcttgtcaaaaatgcttgtttgatcatttgttcaagacctccttcatcttctcgatccaagcggctttcaccttttcaccgcgtattcctttttggtctagtttggtcaagaaccgtgcctgacctaggtgacgatcggcttcaaatcccgtgatggatttacgctgctccacgaatggtgcgatattgcgcccattttcactatagggattgatggcaaattgccccttgaggatcccttctgctgctgttttatagagataagcgttgtacaagaggagcaagtctagttcttccttactcagcatcatagccttattcttatcataggcctcgcccagataaggcgcctgatctgccataaagagccccttgtactgttgacttttcatggtttggttgatggcatcctctactgttttagtctttttcagatccaccacaggatctcccatttccaaatacatggctccgaatatcccttgttcttcttggtactccttcaaatcctgaatcgcagaaagataggtcggcaattgagaattcagtccattaaagaacttgtcatagtggaactgcgtcagactggacttatagtccacgactccgagggctccccgatccctcaattgatcaatgcggtccaccttgcctcgtagctgcaggagacggccatcggacaatggataagaggtgtgggcgctcccaccaaagagggtctcctcaccgatggtctcgataccattttgctgggcgaggacacgtccggttgttttcgcggtatcaagaagcaagctgcgaataaactcggtctctccactctctgtatacaattgctggaactccgcttcttggctggtttctcgaatcgcctcgtttaaacgctgatcaaacgcttgatcggagctatcttttaagacccgttcaaagattcggtgcaagaaattcccatgactgcgggcgtctggccgaatggtttcatcctcttgtaagcccaagacatagcgcagataaaaggcatactggtgcttgtagtattcattcaaggcagaagcggataaggtcaaggctttgccctctggatagagcgcttgaagcgtatccgactgaagctgacggctctttaattccgttgaaatctgaggaatctggatgccttcagcggctaattttttgcgcaaaacccgtaccgccacaccccaaaagctggcttcttcagcagacaactcactagcgatctcttcttgatggagttcgatcacgcgcgctaaaagggctcggtaggtcccgatatcatcactcgaagcttgggcttgtttgatcgtccactcgatggcaataggttccttggtcaattcgacaaggtaaggagagacactatcttccatttcattgaccaagctaggagccgataggaccagttggttggtcgccgcattgagaagcgaaactgccacaaagcgatttttcttgagattttcgctggacaccacctgaagctctgctccttcttgggtggcctcattgagctgctggcgctcttcttcactgagtagagaggtgttctgagcaatctttggaaaacgctcctgggtcagcccaatcgcgtagacataaggcgctgtcaagggttcaatcaagtcataggactgaacggtcaccacatcaacagtggcaggaactgtccggtattgagataattgcatccccgataagaggagggacaaaaagtcatccacggtcagctcttggtcctcaaagaccacgttcaactcttctaagacatgaaggaaggctttccagacctggtcatagcgctcctgctcctccaaggctagatccttgatcaaagcttggagattctgagaaagctgggcctcttgcagaaactctgtaaaggagtttaagagatgggtcaccttttgtttgcgctgtgaaaagaaaggaactagaggttctacgacgcgttctcggagagtattgagctcttctaaattaaacttgccctgacgattgctagtaaaaggcttgtgaaattttgtagcaccctttacttccgcaaaacgaaggtattgctcaaaagcatcgacttcttcttgcgtcagatcactatacagacccgttttcaacagattgatgacgtcttccgtctggtaattgaactgcttgatccgggctagcgattcaatgacctgaatcaagggatggtggaccatggcttcacttcgtcccaagtaaaagggaatttgatactggtcaaaaatggtcttgagttgcagttgataagcttccacatcgcctaacaagacccgaatatcccgatagcgggccccatcatgaagacgctgacggatggatttggcgacaaattccaactcttctttttgcgtattggtctgccagagttggaccgctgttcgatcgtgttcgttgagctcattttccacttgtgaaaaatcgtagcgcgcttctaacgtgcggctaatgcgactaaaagagtcttcgatcgcttgcccacaatactgaggctgtacctcaaaagtctttgccagctgaaggagaaagtcaacactggcctggtaaagattgccctctctaaagcttgcccgataggctttttcactggcatagaccccgatgacaatctccactccttttcggtgaaggagactaatcaaagcctcttcttctgcagaaaaacgcgtgaagccatcgacgacgatcgccacatcctgtaattgctcttccagctgcccttcttcgacctgattgaggaaaaaggccatcttggactgggattcataccgatgcttgaccagcatctcagagaccgcttcaaaaatcgccaagaggtcttctcttttttcagcttcctcgagcaactctaaatcggtaaaatccatctgggctgtctgcaattcatgatagagctggaccaattgctggataaactgaggatccttgcgcagggccccgtaaactttgagatcctgctccttcatgtgggaaagagctttaaaaaataacatgccgagaccgatatcatccaagggttgctcctcaaaaacctgattcaggatgaaataacgggccatttgggcaaagcgcgttacggtaatagcaaaagaagcctgaccttctaaataggacaagaccttggcttctttttcaaaggaaagagagttgggtgcaatgtaaaacacacgcttgccctgttctactaaccctacggcttcttgtgtcaggacctgggtcaagggggtccgaacatccgtatagagtaatttcatccgatccgttctccttttggcattttcttgagagcttgttatcttcttattatatcattttcacaggagggactaaagcaagaagtcatgctcctcctggcccaattttaggagatttgtgctacaataaaagttgaagagacagaaaggataccacctatgaccagcatttataatttttctttagaaaaccagaatggggaggagattcccctatctcactaccaaggtaaggtcctcatcgtggtcaatacagcaacaggctgcggcttgaccccgcaataccaaggactgcaagatctctacctgcgctaccaggaaaaggggctggaaatcctagacattccctgtaaccaattcatggggcaggcaccaggaactgcagaagaaatcaatagcttctgcagcctcaactaccagaccaccttcccacgattcgctaaagccaaggtcaatggtaaagaagcccttcctctctatgactggcttaaaagccaagcagctgggccactaggcaaacgcatcgaatggaactttgcaaaatttgtcatcgaccgacaaggccaagtcgcccaacgcttctcctccaaaacagaaccagctgctatggaagacttgatccaagaattgcttgagaaataagcaaaaagcctgaaagtgtagtcagaatttttgatgaatggctatttattttcgagactttccgctgtgagaaaagtgcctgaaacaataacgtttcaggtactcaggaattttgagagtaaaacagtttgggaaactgttttagcctgagcccagaaattaaagagcgaaggggctcaataattagtcatggaacttcctggattgctgaaatcatccactggataatttcacctaacgtccgtactcacctaaggaaagtttctaagaagacattatccataagccaaaaaagcctgagctaacgctcaagctttttttattattaatcaatttcaagtccaccggtgtagaggcggtaataggtgccacgttctgccatcaaggaagcatggttgcctcgctcgatgatacgtccgtggtccattaccataatcacatcggaattgacaatcgtcgatagacggtgggcgataacgaagacagtccggccttccatcaagcggtccatcccttcttgcaccatcttctctgtccgtgagtcaatcgaagacgtcgcttcatccaaaatcaagactggcgcattggcaagggctgcacgggcaatggcgatcaattgtcgttgaccatttgatagaccagccccatcatctgtcaagactgtctcatagccctgatccaagtgcttgacaaaggaatccacattggcaatccgagctgcttcaaggatttcttcccgtgttgcatcagcacggccataagcgatgttttccgcaatcgtaccagtgaataagtgggtatcttgaagaacgattccgagggaacgacgcagagaatctttctcgatcaatttaatatcgatcccatcataggtaatcattcctgattggatgtcatagaagcggttgatcaagttggtgatggttgtctttcctgcaccagtcgctccgacaaaggccactttttgccccttatccgcgtacaagttgatgccatgaaggatttgtttcttcccatcataagagaaatcaacatcatcaaagaccacatttccgaccatcttgacaagctggtaatctccgtttggacgtgggtgtttccaagcccatttgttggttttctgatcagtttcgaccatttctccatcgaccagttcataattgaccagcgtcacttttccttggtcgacttcttcttcttcatccaagagatcaaagacacgatctccaccagccaaggccatgaggacaaagttcaattgttgagagacctgtgcaatgggacctgtgaaggaacggttcaattgcagaaaggccatgagaccaccaatggttaaaccaccgacgccgtttagcgcaaagagtcccccgatcaaggctgttagaacaaaggagacatttcccaagttcccaagaatcggcatgaggacattggcatagcggttggcttggtaggaagactcaaagagttggtcattgatccggtcaaaatcctcaatgctttctctttcatgcacaaaggccttgaccactttttgaccagacatcatttcttcaataaagccgttctcaatccccaagttcttttgttgggcgccaaagtaacgacctgacttgccagagacatccttgatgataaagaccatgacgatgaccatgacaagaacaatcaagaacaagagcggactaaccgtcagcatggtaatcgttaccccaaggatggtaatcgctgaggataagagttgaggaatggattgttcaatcgcttggcgaagagcatcaatatcattggtatagatagacatgatgtccccgtgttggtgggtatcaaagtaacgaactggcagtttttgcatgcgagcaaacaactgatttcgaagacttctaagtgagtcttgtgaaacggtcgccatgatcaaggtaaagccatagttagcaaggaccccgatcaaacagatcaaaccaactcgtgttaagaaggacaagagcggtccaaaatcatggctattacttgtcagcatgggctccacatagacatcgaccaaggactgaatcgaagctgtcacattaaccgtcgcaagagacgatagaatgattaagataaaggaaacaatcaaggataccttgtggtttttccaaaggaagtctagcaggcgaaggatagagcctagatttgcttttttcttagttttcatctgcttctcctttcccttgtgtttgcatttcatatacttcttggtagatggcattggtcgcaagcaattcctcgtgacgaccgatcgcatcgatttgaccatcattcatcacgataatacgatctgcatcttgaatagaggaaatccgttgaccaatgatgattttggtggtctctttcaagctggttgccaatccttgacggatcaaactatccgtcttggtatcgaccgctgaagtcgaatcatccaagatcaagatcttgggattcatgagaagggcacgcgcgatacaaagacgctggcgctgaccacctgagacattggatcccccacgctcaatcatggtgtcataaccctctttgaaatcttgaataaattcatcggcttgggcgatcttacaagctgcgatgatctcttcatccgtcgcatccttatttccccagcgcatattttctttaatcgtaccagagaacaggacattggtctgaagaaccatggccacttgcttacgaagggaatcaagatcgtattctttgacatcgtggcctgctactgtcacccgaccagactcaacatcatagagacgaggaatcaactgaaccaagcttgatttccctgatcctgttcctcccaagataccaataacttcccctgaacgaatggaaagattaatcccttgtaagacatgggtcttgtcgccattttcatcggtataagcaaaggtcacatcctcaaagttgatggatccatcagcgacttctttgatcccattttctggagagtcaatcgtcgttttggtcgttaagacttcattgatccgctcgacagaagccatggaaatcgacaacatgacaaagatcatcataaacatcatgagcgacatgagaatggtcatggtgtaactaaacatagaagtcaaattcccagtagagagttgaccaccaacgatcagatgtgccccaatccaagagatcaaaaggaaagaagcatacatggaaagcatcatagctgggctactcaagacaacgacacggatagccttcataaacatgttataaatcaaacgcgaagccttcttgaatttaacggtttcatctgcttccttaacgtaggacttcaccacccgcatattggtgatgttttcttgaatgctattgttgagattatcataagcttcaaatacttctgtgaagagcggatacacaatcttcatgatgatgcttaagacagctgccaaaaagatggtcacatagacaaagatcatggccatttccggattgatcaagaaacaagcaacaatggcaaagatcaaattgagcggtgcccgtacacagatccggatcaccatttgataggcattttgcacattggttacgtccgtcatcatccgagtgactaacccacctgatgagaactgatcaatattctcaaatgagaaggtttgaacctttttgaaaatggcccgacgaaggtttttggcaaaaccagccgatgcataggcgccataacgggcagactgcatcccacaaaagagggagagaaaggcacagaccagcatgagcccaccgtaaaacaaaatattgttcatgtttctttgttgaacaccctggtccaaaagactcgccatgacaaagggaatcgaaatctcaaacatgacttcaaataccatgaacaaggaagccaaaatcgagggcttcttgaattctttgatctcggaaattaaggatcgaatcattattacctccaatgttattcatactttttcctgtggtagaagcaaagcttctttccaccgaaaataggtcaaaacacacaaaattccctgagggaaagaccctagggattacgcattttttatagtcttcattgtaacctaaattacaaaaaaatgcaagatttttagacagtgtcattttttctgtttattcagtgcaaaagaggctgggacaaaagtcctagcctctcaattgtctttggattgtcgagcaagacgcagtggttgagtgggccctactacgctgatttcatcagcttttacagccctactcaactgtgcggaggtgggacgacgaaatcgaattctaacgaattaccaatttctgtcccactctcttttttatttattcagctaagagcacttctttgatggtttgtttttgtagttttctgttggatagataaaagaggctttcgtaaaccacagcaaaagcaagcaaggtccagaagcacacattcccatcaaagtaatgctcaatcttttcaggaaccgtatctttgatcacaccgatcaagatttccataatgccatattgataagccgtcccaagaacaaatcctaaataagcccaaaaacgatagggagcgagaatatgactttggcattcacgattggtgtagccaaaagccttcataagagccaaggtttcgcggctttctgagaccacaatccccaatgacaaaaagagaatcgagaaagaaaggatcaagccaatcataatcatcatggtttggatgatgtcatctgtataatctcttaagccaaaggacaattgaaccatggccgcaaaacacatagagccaaagacaacaaaaaacaagatcgattttctcccccaaatcagagatgaggacagctcttttaagaagtctttctctttcttaggagcccgctttctcctttggaccttgattggggttggggactttttcaataagcgaagtgccggcgtttgtaattgtcttctagcatagccaatcgcgagaagcataaagaagctcgttggcaggatcaccaaggcaagcaggagctgccaatgaaaatgaatggtgatttctggcaggatccccttttcattacgaaagtcataaaaatgtcccatcatgagaaatgaagcaaaatagccaagaaacgctccaactccaaaactgagtccaaaggcccaaaatcgtttcgccaactggccattgctgtagcccaaagcctttaaaatccctaattgttccttgtggtcatcgacaaattgtttgatataaaaacacatgagaaggaccgacgtcaaggacaagacgaccccactgaccatggccaccatccaagaaagcgaaacctgggcatcatagtaggtctgaatcatcggattggttttcgaaatctccaactgctcgatgtccaagtaaaaatttaagaagagattggccacaaagaccgcacaagccccaatgatactgacgacaactaattttcgaatatcttttactgaaaacatggcttaccatccaatctcataagcagtctgaggctgatcattggtcacaacttcggtaatcttgccactattgacgcgaatgatggttctggccatatccgcaatattttggttgtgcgtcaccatgatgagggtaaagcccagcttttccttcagtttccagatatagtccagaatcttgcgccctgtttcttcatcgagagctcccgtcggctcatctaagaaaagaatctcgggctttttggccaaggcccgggcaatagagactctctgctgttccccacccgacaattcacttggatacttgtctagcatatcgccaagtcccaaatcttctatgatctgcaaaaaatcatgattgtttgccaggtcagctcccatctttacattttgtctaaccgttagattcggcaatagataatactgctggaaaataaaagcaatcttctcacgtctaaagtccgtcaattgagcatccgtgagttgtgataaatcttgtccttgaatgagaatatgcccctcgtccaccttttctaagcctgataacacatttaagagagttgatttccccgatccagaaggaccgaggataaccacatcatcctggtcctgaatctgcaaaccaatcccctttaaaaccttggtttggccgtaacttttgtgtacattttctagttgaatcatttctttcctaccatttctttgatgagagattgacaaacctctgtcagtaatccaatcacttcttccatgccgaactggtaaataccagaagcaaccatagaagccatcccgtgcgagtagataaatagatgctggtacaagcgactagcctcctctacagtcaaaggatagtctgcgacaatcgaatccagaaccaattggtaactatgatccttcataggaagaaaatcttgaaatcgacgaatcggatctttgctaggattttggaaaagcaactgaaagagttggggttcttttgaggcgaaaaggatataagcaaccccgacagatcggaaaggtttctcatcttctaaggccttgcgaatatactccaccacgaccatctccgcagcaccaataacctctgcttgtaactcagccatattggcaaattgcccaaaaatgactctcggtgtggctcccagcttctccgctaatgctcgagctgtcaagctagccatcccctcttctctcaccaattgtaaagcggtcccaatgatagcctctttactaaatttaaccttgggtggcataagactcctttcgcgcaacttccgttgcgcaacacttgttgcataaagaatatcataaaaaagaaagacttgtcaagaaaaatctgaaaactaccaaacaaaaaaccagaccaccgataagagtggaatctggtttactaacaagattctaaggcaaatcattccctgcagccaagtagatttggtaccattccttgcgagtcaaagtaactgttgctgctttccctgcttcaaggacatgctggggcttggtcgttccaatgacggcttgcatcttaccaggatagcggaggacccaggcaagggcgatagctgtcggtgtgacctggtattttttcgctaagtcattgaggacatgattgagagctgcaaactcttccttgccgacaaaattccccttgaaatagccatgctggaggacagaccatgcctgaatcaccgtatcagttaaacgacaatactcaaagacactgccatctcgcacggctgctttttgcccttccatgttgacatgaaaaccagcttcaaagctcggtgtaaaggcggcactcaactgcagctggttgaccttgagaggttgtttgacagccgtcttaagcaattccatcatcataggattttgattggacaccccaaaatgacggaccttgcccgcttgctccaagtgatcaaaagcttccgccacttcttccggttccatgagggcatccggtcggtgaaggaggagactatctaagcgctcgatctgcagacgctcaaggataccgtcgacagagtccaaaatatagtccttagaaaaatcaaaataggtaaagccgtccttgcgaatcccacacttggactggatccacatctgctcccgaagatccggacgacgcttgagaaccttacccaacagtacctcacactggccatcgccatagatatctgctaagtcaaaggtgttgatcccaatcgataaagctgcctccaccaaggccaccacctcatcttcactcatctgactgatccgcatcatcccaaggacaatcgtggacagacgctcattttcagcaaactcaatatagttcatgtccgcctccttttctgtaattccattgtagtgaaaaggcttgcaaaagtcaatttgaaatcaaaaagccctcagcaataactgagagcttgtttgattagcgatagctaagagcacgtttgatggtcttccatggtccgaggtcatcggtctgaaggatcaggctggcatagatacgggcgatgagcactgttcccacaatggtaaagagaaccgcaattcccaatgaagcccaagcttcaagaccagtcgcatagccattgatggtacggaaaggcatgaagaaagttgaaatgaatggaatgtacgaaccgatcttcaataagaagacatcaccagcacttcccaaggtggttaccccaaagaagctaaagaggactaacatcatcagtggtgaaatcgcttttcctgaatcttcaggtcgtgcaactgtggagcctaagaaggcagagagcaccacatacataaagatcccaaggataatgaagaagacggtattgagcgagattgcttctgctaggtgttgggtaattggagagtttggagcgagaaaatccttgacaacagggatatctgctctaaagatccaaaccgctactaaaccaatcacatagacaaaaatatgggtaaagatcactccgaagagtccgagcatgcgtgcgaagaaatagtcggttgctttgatactagagaaaaccacttccatgatcttggttcccttttcactggccacttcttgggctgtgatactagagtagaagatcaaaatcatataaagcaacattcccaaaccacctgcaaccatggtttgcaccattttcaagccttcttttttctcgtcaattttttctttcagagaaacctgttgagacaaggctgtcagttgctctttgcttagattagcacgggccatattgatcccctgttggacttggcttaatttcgcagcgacaagggttttcaaatctgttttcatggcttggtcgcccacataagtcgcttctagctggccatctttttcatcgaccgttaggtaagcagctgctttctcatccttgatagcttttttagctgcagcttcatccttgtagtccaaggtcaagccatcagttcctttgagactttctttgacagctggaacttctgtcaccaaggccacctggtttttggcatctgtagaagaacctgtcagataaccgattccaatgctcaatcctaaaaagaggaagggaccgaagaccatgaagaggaaactccatgatttcacttgtctgatataggtttctttcattacgacaaacatctgtttcatacttctactcctgattcaagtttaaagatctcatcaatagttggggcttggtggtcaaaggttgctaggtagcgacccttggtcaagcggtcaaataattctggaccagctgacgcatcatccaagatcaacttccaagtaccttgcttggtcatgctgaccttggtcacgtgtggcagagcttctagctcttctttgctaaagtcgttagaaacaaagagacgagtcttgccatagctattacggacctcttggacaggccctgaaaggaccaccgaaccatcacggatcattaggatatcatcacacaactcttcgacgttggtcatgacgtggtcagaaaagataatggtggctccacgctctttttcttcaaagatgacctgcttgagcacttctgtgttgaccggatccagtccgctaaagggttcatctaaaatgatcaatttaggctcatggatcaaggtgatgatcagttgcaccttctgttggttcccttttgagaggctcttgattttatcagtcaatttcccttttacttggagtttttccatccaggtcggtaatttttccttgacctcggcagtgctcattccttttaaggcagccaaatagcggacctgctcaaaaatcgtgagttttggcatgagactacgctcttctggcaaatagccaatttccttgtaggtttcttgggtgatcgctttgccacctaggagaatctcgccgctgtagtccaaaaagcgcaagatactgtggaaaatagttgttttcccggccccatttttcccaactaagccaaggatatgcccttgttgagctgtcagatctactccgaagagaacctgcttattcccaaagcatttttctaaatttctaatttctaacatggatgactcctctactctttataataacgtttggtaatcttgtactgagagaccaagatatagacataaatcagtgataccactactaatgctaacaagatatctgtatggaaagcaatgccaactaagaatatcgcaattaaggaaatcggcaagatataattgcttaacttaatgataatttcatagttttcctcgtagctaatctgcttttctgctttatccatcatactcatcataaattcacgcacttccttggcattggcattgcggggaatcggttttccataaatcagatggaaggtcttgcgaaagaagatatccgataggaaaaatagggcaatcaagacaagaaagagatagagcatggtaaagtctccaaagataaaagccaagtgccctgtggaaggtctatccatatacacccattgactataaaagatgatgactaaaaagtatggcaagatcatgactcctttaaaaatggtcgctaacccaaacagtttttccttctggatgtcatagtgataggcttcctcttcgtcttctatctggagcattttttgatggacttttctcgcgcttattagtaaggctatcgtgaccataaacacgataagaaacaaaagtattgaaccccaaaggagtccttctttactaaagaaggattggatttcaaggggtttttcggatccgaacatgcctgtcaaaaaaccaatgactcctccaatcaagccggaaactgtaatgattccgacatttctccaaaaccggtaacgagcggatcgttcttgttgttgctttttcatattattcttctccctctactagactaaagacattctccactggttcattgaagatctgggcaatggtcatggcgataatgacagaaggtgtatactcaccacgttccaagagactgatggactggcgcgagacccctgctagcttggctagctcggattggttgagtccatcacgcgccctcagctctttcaatcgattttttaaaatcatggcatcagcccccttatagttgaataccttgaatatcttcgatacggactaacttggtttccctctgttgtttatgaatcacacgggtcagtttgacccaatcttcatcaaaatcaacaatttcccacgtagttccaaatccatttactgtcaccttgaccgtttggccttttaattcttctaaaagtctagacatttcttgatttcctttcacttgtttttctaatcttttaatacgtttgttcaacttttttatcttcttttctgagcttgcataaatgataaccagaaaagggataaatagaatccatatagctcccataagaatacctccccttctttcaactaaaattattgtaacacttctttttctttttgacaagtatatttttcaaaaaaataaaaatatttgtcaaaaatagaaggatggttgacatggatattttgaggtaagaaataaaaggcccgcatttgcgcaccttttaaagattcttttctccctgctatgaatctgaaaagacttccatagtaagaaatataactttggtcgctacaagataatcttacacgtgtttaatctcgatgaagtctaaactagtaggactaggctagctctgatcattttcatcatccttgttccctgcatcttccacaagccacagcaaagtaatgatcaactcatcagcttaaaaaacttatctaccactcatatctaggaggttaccatgtcaactattcttatcaccgtccttatttttttagctggacaaggtcttcgctcctacctcaagggaaaaggatcctgcggagactgcgagtgttcctgccctatcaaagacgaaatgcaccaatcgcatcgccatcagtaaagaataggtgtgtaccagaaatcagaaacgtaaaaaaccattggtcaattgaaccaatggtttttctatcctcctatttaattctctacgatattaaaatcttggggagctttgacttcttttatctggttaatatctcgataagtaaattcaaaatggtcttcattgttcaccgttcgccctttatcatttttcaatttggtatctagttgaatcctagcctcgctaggaactaatttttcttctttatttgaggagtctttcttcatagataaataaatgtgcaacttgacggactgaatctccttttttcctttggtgtaaagctcactatctaacaaagtattttgaaattctccaatttgatcaatatctttcttaacatcacccttaaattccagatagatatactgaccatcgatagtttttttaaatcgatccgcatacttctcataaagtttcaaaatgagctcatgacgccccacttctggatcttttctatttttatatattagatctggatctgtagcttcatccactcttttccaagtccaactatcgtctcccttctttatttttttatacagaacccctttttcaggagaatatagtctcaaaattttctccccataacctgtagaacctattttattggtaagacctcgaaaatggtctgaatcactgtctatcgtagatccatttcctccatctttcgtataaaattcattatatacttgagggtcaaactgaattttcccatgtcgcaaggttgtttcatacattagtgattgtgaaccttttacctcaagtagattctttcgataaattttactgacatattccatgttttttgcatctctcatggcttggataaacgttttcacatctttactaccactatcttgtgtcgtatcctttgaaggggttttagctgattgacaagctgaaaggaatagacaagcaagaagagataagaaaaacactaataattttcttttatgtttcatatcttcactccttttgaactaaataccacctaatttttcaacagcctctggtacttctacttggacaccagtattttgttttgaataggtaattttacacgttaatttttctttcgcaaaagatgaattagaagtacaagtataagtaacacctaaaggtgtcaagttctccttagaaacgatgaggtctatctggtagctcccttctgaattttcaaaataactaactcctatgggaacagggccttgcaacacggcgttatttggttctagtaaatgattgacatccttactcttataggttaagacatactggtcctttttcttggtcacttcaaacttgtctttctgtgtctgaaagaagcgtatggcttcttgatttacccccacaggttgtttattctcttgagaataagaaaacatttcccactctgatgagtcttttggtctagaatactcatgaaaggcatcgtaatactcttcttgactcgtaccgttgttcgtatatagtccacgtaccctcactggttttaattcaaaggatccttcaaaagtcggagtatatactgtgtgtgtactcccatcacttgttggttcactaaattctctctcaatcttgttctccagtttgatttccccatctttgaggtgttcaaaagcctggagccccttgtcgatgatttgttcttggcttagttcctttgaattttccttcttgccctcagcctgttgacatccaactagactaactactgccaataaaccaacaagtgacaagataggttttctcatatttaacatccccattctccttccttttttcagtaaatctactaatgtttattcttctattataaacgattctatgatctttgtaaatcctttcacaagcttgtaaaaagattgtcattttttaaatacaaaacaaaaacagccaagagcatgtctcaactgttttgatctaaacattaacgcacttctgcattgactttttcttcaagtgatgcttggattttttccatgtagcgagcgacttcttcatcggtcaagctatcttctggattttggaaggtcaaactgtaggccatagacttcatgccaagtcctagtttttcacctgagaagacgtcaaagagtttgatgtctgttaagcgtttcacaccagcagcttgaatggcatcgactacctcttggtgagtcacttctgctttaaggagaagggcgatatcacggctcacagctgggaatttggtgatttccacaaaggctgcggctggttgaagagctgcttcaatagcagataagttcaattctgccacataggtttctgggatatcataagacttagctgttacaggatgcacttgccccaagaccccaatcacctggtcaccaagtgagatcaaggctgtacgtcctgggtggagactcttgatttcttgtgttgctgtataagtcacttcaagacctaaacgagcaaagagggcttccaagattcccttagcatagaagaagtcaactggaacagctggagtttggaagtctttttcagcaactaagccagtcaaagcaaaagcaaagctgttgatttcatttggcaagtcttcttttggattgcctttttgttcaaaaacttttccgatctcatagagagccaaatctttgttcttacgcgctacgttgtaggcaactgtatccaaaatacctgaaaccatattttgacggaggaccgaacgatccacagtcattggccacatgagctctgttaagttacttggcgcagttgtgaactccactgctttttcaggagttgtcagggcgtaagtgatgatttcagtcaagcctgctccttcagcaatggtccgaacttggcgacggagtttttgagtcgctgtcaattcacctgctgtcccgtcatcttttggaagagttgctggtaatttgtcataaccataaatccgtgcaatttcttcaaagaggtccgcttcgatggtgatgtcccaacggcgacgtggaacactgacagtaaaggcttcatcgtttccagaaagaccaaatccaagacgacggaagacatcttcgacatccgcgtaggaaagctctgtccctaggacacggttaacgtctgcaagggtagaagaaacttccacatcagaagtgtcgagctggcctgctgaaacgatgcccttacgcacggttgcacctgcaagctctgcaatcatgctcgctgccgcatcaagggcttcattgacagtcgccacattgatccctttttcaaaacgtgaagatgattcagaacgaaggttaaggcgaccgctggtcttacggatcgatttgccattgaagacagctgcttcaaggacaacacgagtagatttttcagagatttctgtagcttctccacccatgacacctgcaagggctactggtttgtccgcaaccgtaatcacgaggtcacttgtctccaactcaggttcttcaccgtccaaggtcactaatttctcaccagcacgcgcttcacgcacacggatctcgcttccttcaaaggtatccaagtcaaaggcatgcataggttgaccaaagtaaagcaggatgtagttggtcacgtcaacgacattgttgatcggacaaataccttcgttcatgaggaggttttgcaaccattgtggacttggtgcgatggtcacattatccaagatacgagccgcatagtaaggagccttatctgtgtcaatgctgacagaaagagcatctgctgcagcttggtctgtttcagtcaacgtaaagtctttgaagttgacttccttgtcataaatcgctgctacttcgtgcgctaccccacgcatagaaagagcatctgcgcggttaggagtgatggaaagttcgataatttcatcatccaagtctaggtaagagaagacttcgtctccaggaacagcatcttgaggcaagatttggatcccatctgcaaattcttttggtacaacagagtcagaaatccctaattcaccaagggaacagatcattccgagagattccaaaccacggattttcccttttttaatcttgtagttgtccgcgatacgagcacctggaagagccaccatgaccttgatgccagcgctcacatttggtgctccacagacgatttgacgggcctcttcttcacccacattgacttggcagacatgcaagtgtgtttctggcacatcttcacaagacaggacttctccgacgacaatttttgagagaccagcagcgggtgattccacaccttctacttcgatccctgtggttgacattttttcagccaactcttgtgatggcacatcaatgtccaccaattcttttaaccatttataactaactaacatatgtaagataccaagggcaatgctgaaatctagatagctttcctagatctccatccaccctcgttttgatcctttcattttgtgttttccagctcgaggctagcttaggaaggtctaataaccttcccttctctagaatagaagtttcttgttccttctaggtcaatttctttctcaacaaccagtctgtatccacggtatctccggtaacatactggtgttcactaaatcgttcaaaaccaaagcggtagtaaaaatcttgcgccttaaaattacgctcccagacacctagccaggcccaggaaaaaccatttttttcggcatgttccagagcgaattcaaatagttgcttaccaagtccaaatccttgatatgtttgtagcacgtagaggcgttgaatttcaaaagcgttctctaattctctctcggtttgagcatttccccagttgactttgagaaaaccagctatctcctcttcatgcataatgaaataggtttcggagtcaggattttccaactcagttgacaaaactctcagattataagcctcttcaaagtattcctgtaactgctcttccgtattatcatgagcaaatgtttcacgaaaagtttgtttggcaagttttgccaacacctcaacatctgctaactccacttttctaatcattatttaaactgttctgagaagcggacatctccttggtagaatccacggatatcgttgattccgtaacgaagcatagctacacgctcttgtccaagaccaaaggcaaagccagagtaaacagtcgcatcgataccactcatctcaaggacacgtgggtgaaccatcccggcacccataatctcgatccaacctgttttcttacagacgttacagccggctcctccacacttgaagcatgaaacatccacctcaacagaaggctctgtgaacgggaagtaagatggacgcaaacgaatttgacgctcttcaccaaacattttttgtacaatcaactggagggttccttgaaggtcagccatagagatgtttttcccaacaaccaaaccttcgatttggtggaactggtgactgtgggttgcatcatccgtatcacgacggaatacacgtcctggtgagatcatcttcaaaggaccttttgaaaaatcatgggcatccatagcacgagcctgaactggagacgtatgagtacgaagcaagatttcttctgttatatagaaagtgtcctgcatatcacgagctgggtgatcctttggaaggttcatacgttcaaagttatagtagtcttgttctacttcaaaaccatccactacttggtaacccatcccgatgaagatatcttctatttcttcactagtttgtgtgaggatgtgacggtgaccagtcgcaactgggcgacctggaagcgtaacatcaatgctctcacttgctagttgagcttccactttcttttcttccaaaagtttggccgtttcttcaaaggcagccgtcaagacatcacgcgcttcattgacgtgtttcccgataaccggacgcatctcagcagagacatccttcatccctttaagaatttccgtcagagatcctttttttccaagaacagagacccgtagttcttgcatctcttttttattttcagcagaaatctgcttcaaagctgccagcgtttcttcacgaagcgcttttaattgttcttcaatcgttgacatatttcctccatcatggtccctctacagacatagaaaaaaccacgcgccaacaccctcattcggagcgttgacacgcggtaccatccgttttttatccgtaaaccagaccttaatttctaaatcctttacgcaagtgaattcactcagctttcatgcaaagagctttcagtcacggctcttctccctgtcgcacttcccttgagatactagtcttgcagatttctattcgattactatctagtttagcagatttttagttaaaaaacaagttagatgagactaatttcaatagaagaaggaacaggacgcaatgcattatctatttgcctggtctgcttcatctgctttccttttcaatagaagagttgctgcttggttaaaaccatcacaccagttataccattttgcttcatactcatcttgaggtaagatacgatgttttaaatccaaaacagaggatatctttctttcctcgcaagcttgcgcatagagagcatacaattcatcgccaccatctctatcaaactcagcagaaatcgtatcccgacctgccaataaagcctgataagccctgtgatgcccgtctgtaatcaagaagcgatttccaaatgcaagaacactaattggatccacattgatgatgtctgccgactgatccagcatctggatagcttgtaacttcttttctgataaataaagttgggtcggatgaagatctgttatcttgacttccatttctttctcctctaccaagagtataaaagttggttctgggcactggtagacattttcaaaggtcacgatttaaagacctgccaaagccaaattcccccgccattcttgtgattcgttttctttttatttaatgacttgtccagcatctttcaagacagattctggaatagtaatacccaattcatctgcgacttttttattgatgacagattttccttggctaaagatttcaacaggtgtgtctgcaggtttttgacctttcaagatcttcgcagccattttaccagttgctaccccaagatcatgttggtcgacaacgactgaagcaagaccacccgcttctaccatggctgtcgcacttgggaagattggttttttagctgttttgttggcttcaacaacagttgagaaggctgatgcgatggtattatcgattggaacccagatggcatcgactttaccagtcatgacagaaactgttgaagcaacttcgtttgttgaaggtacagagtaaggaatcaccttgtaacctgctttttcagctaattttgtaaattcttctacttgagatttggaattatcttcactggttgagtacaggataccaattgttttcacgtttggagtcaactctttgatcaatttcaactgttgctcagttggattgtggtcagatactccagtgatattgccacctggttttttcaaatctttgactaagtttgcgccgaccggatcagtgacagctcccataacgattggtttgtctttagttgcactagccaatccttgagcagatggggttgcaatcccaatcaagacttggttatccttgtctaccaattgtttactcatggtcgcaactttattttggtcgccttctgcattgaggaaatcaatgtccactttgtctttgtcataaccttcttcagctaaaccatcttgaatccctttgtagatcagatcaagcgaagggtgactgaccaactgcaagaccccaactttagctttctcattgctgcttgctgccttgttgtctttgcctgctgtagctgaatagatcgctgtcccaatgactgctgctgcaatcaaaccaataattcccattaaacgtttatttttcatttttaatacctcttctattttttcattttcttctttttttccatcatctaaagactgcgacgccatcgtttcttcatatattttctcccttctcatctaaaacaaaaaacacgcccacacatagcaaaagctatgtgaggacgtgtcatcgcggtgccacctcacttatgggaaaaggatagtctccccccatatctctgtcttgtctagcaacaagttgcacgataaggtgtgccaaccgaatttttattgtttcaaattcatctcatcattagtccaatttcataaactgccgctacccactctcagcaaccgtgggctctcttgaaactttcatttactacttttctaatttcttacattttaaaattttctttcaaaaatgtcaatactttttctgaatttttttgaaaacgttcgcattttctattgaatagcctcttgcttctttctgggatttcctcgctatttttgatataatttactagaataaacgctagaatgatgaggaatcccatgtcttttgatggattttttttacaccatatggtggaagaattgaaggccgaactcttgagtggtcgcattcaaaaaattaaccaacctttcgagcaagaattggtgctccaaatccgaggcaatcggaaaaaccaaaagctcttgctctctgcccattctgtctttggacggattcaacggacccagaccaactttgaaaatcctgcctttcccaatacctttattatggttatgcgcaaatatcttcaaggagctgttattgaagggattgaacaaatggagaacgaccggattctcgaaatccgtgtctccaataaaaacgaaattggagatgctatttctgtcagcctcatgatcgaaatcatgggtaagcacagtaacattattctcctggaccgcaccagtaataaaatcatcgaagccattaaacatgtcggcttctcacaaaatagctaccggaccattctccctggatcaacctatatagctcctccgaaaaccgacgcggtcaatccttttactattggagacgaagccctttttgcccttcttcacaaggaagagttaagtccaaagaaccttcaaaaatgtttccaaggtttggggcgagatacggctcaagaattagccaagagacttgagacgaatgaaaaattaaagaccttccgtgcctttttcgagacgcctactgagcctcacctaacgaccaaatccttctcggctatcccctttgcggatgcgtccagtcaaacgtttgaaacactttcagatctgctagatgactattaccgagacaaggctgaacgcgatcgggtgcaacaacaggctagtgaattgatccgaaaggtcgaaaacgatctcgaaaagaaccgaaaaaaattagccaaacaagaagctgagttagcagcgaccgacaatgcggaagaattccgccaaaaaggagaattgctgacaactttcctccatcaggtaccaaacgaccaagaccaggttgttttggataattactatacagatgaaccggtcaccatccaactcaacaaagccctgacccctaatcaaaatgcccaacgctactttaaacgctatcagaagttaaaagaagccgtcaaacatttgaccatcctcattcaagaaaccaaggaaaccatttcttatcttgaaacggttgaaacagctctttctcaagcgagcctggctgaggtggcagagattcgagaggagttaatccagaccggctttatcaaacgacgcaaccgtgaaaaaattcataaacggaaaaaaccaaaaaaatacctggctagtgacggaaaaaccattattttagtgggtcgcaacaatctccaaaacgatgaattaacctttaagatcgctaagaaagacgaactctggttccatgccaaagatatcccaggcagccacgtcgtcattacaggaaatctaaatccatcggatgaagtaaagaccgatgctgcagagttggcggcctactattccaaggcccgtttctctaacctggtccaagtggatatgatcgaagccaagaaactcaataaaccaactggcggaaaaccaggctttgtcacctataccggccagaagactctgcgggtcaccccagaagaagaaaaaatcaaagctatgaaactagaagactgatttcaaaaataaaaggttgagtatcgctcaacctttgagtatgtatacaaactgttccaagtatgctgaaaaataaaatgaggtatacttttaggctcattcaacatatattgaaactttccgctgtgagaaaagtgctagaaacaatcttgtttctagcactcgggagttttggaaccttaggtccaaaactaagtcatggaacttctttgaagttcgctgacgtccgttctcacctaaggaaagtttcttaaataacattatcttcaatacgaaaggttgagcgacgctcaaccttttattctgctttattgatatcttctttgacctcatcaacattgaatttggcaaagaggtactgacggtcttgaactgggaaacgttgatccagctgatcgatggctcccacctctacaatcccttctgtgatgacaaaatccatgacatggccaccaaaggtgtggtcatctgaaataaagtgcaaatgataaccagccacactcacaccatggaaaatttcgggtgtccaaaaaccgacaatggttccagtgacattttcccgtgtatactctggctgatgggttgcaacctctgcaaacttcatctccggtgttgattttggaatcatacggacatgcatcttgacaaagtcaccacgaatcttaatggagcgaaaaagattttcgccatcgtaataagactcaatacgagcttccaattcctcgtccgtcatttcaaagcgttgacggaaaatcacttctgcttggtgaggaacaactgctgcataaggaaccttggcatcaggagaaacttcgacaatttcaggatggtcgcctgatcccttagcctgataagcctttccatctaatacgatcaactctccatcaatagaatcaagcgttccaactcctagatccccatgttccaagagttctccaatcgtaaaggaacccccgtacagacccgccattagggcacccaaggtattgtattgaaaaagtttcactggttccatgtttttctctcctcattctatcttctaccagtataccacaaactgttccgaaacttcacgatatggttttattagaggctatcatagatggtttgcatctgcacatcgtctggtacgatcgccaaatactggttggccacttcacgcgcccttgtcacatcgccagcttcacgcaacagataaacataggcttcgaggaattctggattttccttcaagtcctcatagagctcttggtaggctgatacggcttcttctgttttctctaaggcagccaaagcacgagcaatgttccaacgggtgacaactgtttcgacatcttcattttgccaatctaagacttggtcaaaacgctcctgttctaaataaagggtagtgaggcgaagagcaatctcttcgagatcatctgccacttctttagcttccaacagataagtttctgcctgttcaggctggtggagttcataagaaagctgagaggcaaggagcttcaactgtgcgtcaaatggattcttctcaatcccttgtttggcgatttcaagcgctttttcacggtcattttctgcctgtaaggccaaggcatacccgtactcatacccttcaaaatcaggcgacaaggtgtcaatttgtttgtagtagatcagggctttttggaattcttcttggtcagacaataaggtcgctaattcgtaagcaatctggtcatcaaactcaatctccagagctttctctaagaaaggaacagctgcttcaaacttaccaagattggcataggcaaaaccaatccgttgataggtggaaattcctgttgcttccaaaatctcccgattgtccaactgggcatactcttggatagcctcttggtagcgttccaattccagatcaatttcagctagccctaattgaatgatgggatcatcagacaaatgagcagcttcaactaatttttcacgcgccacatctgctaggccttccatctgatagagatccgccttaaccaagagactcgctacataccagttagactcagggccaatttcttctaaataagcaaaggcctcttccatttgaccttcctctgcaaggatggttgccaaacttagatacacttctggataggtttctgcaatctgttcatagatctcctttgcctgaggataaaaaccgatactttcaagatattgacccaaatccaataattgtgcttcactatcttctaacaaagcctgttgaaattgaacttctgcctcttctagctcttgccgatcgagagcttctaccatttgttgactatgactcactgtgtgtttcctcttctacttcgttgtgttcttcatacaagccactgacgaccttataccattcaaagatagctccaatcaccaccttagcagatgcatagactggaattccaaggaaaactccccagattccaaacatagatcctgacgtcaagagcacaaataaaatggtaattggatggatatttaactggctccccaaaaccaagggtgatacaaaacgtccttcaatggtttgctccactgcaaatacaatcaagaccttgataaacatctccggtcctgctaccaagcccaatactaaggcaggtaacatggctaagaaactacccaagtaagggatcaaattcaagatccccgcagagatccccagtgtcaccgcatagcgcaagccaatgatcttaaagaagatgatgaacataatggcgacgacaatggctaccgtaatttgccctcgaacgtagttggagagttgggtgttgacatctgagagaacttgttcagccgatttacgaatcttagtcggtaagaagcgaacaatgtggccctttaaattttttccatctcgaagaagataaaagacaataaaaggcatgatgatcaaggcaacaatgacttgcgaagccactccgatcaagttgctgacccaattgacagcccgcccagagatcgaactcgcccaagaagtaatgtttgctgacaattccttagtgatctcatctaattggggtttgatatctgaggagacgcgattatctagaaaatcatcgatggttgcattggccttttccaaataagttggcaggttatgaaagaaactcaccacttgtcgttggacggatggaatcactacagctagaccccaaattaaaagcactgcaatcaagaaaaagacgaaggaaatcgcaaaaatccgctttagtccttttctttcaagaaagtcaacaatggggttgagcaggtaatagagcaaaccagagataataacaggcagcatgacggctcctgcaaactcaaaaataggaataaaaataaatgtgattttactcaaaaccaaaagattcaagcccaacagcaaggtaactaaaaatacggtaatggccttgttgtctaaaaaccatctaaaaaaccaggacaaactaaactgtttttctttattatccacagagaactccttttcatttcaatctgtttctattttagcattttttgagcttgaagttacgaaaaaactagcaaaataagaaagaaagaccctcccctttttaactagcaattgccttccaataggacctttgatataataaacctaacaaatcatacgaggtgacctatgtctcaaaccatttatttcggtacctataccaaaaaagaatccaaaggaatttacaaggcacaatttgaccctgaaacagggacattgagccatcttgaactagtggcagctgagcccaatccaacctatatcgctttttctgaaaaaggcaacctctacagtgtcggagctgaagagggtaaaggaggaatcgcaagctttacagctgattttcagccactcaatcacgtcgttgaagagggagcaccactctgctatgtctctgtcgatgacaagcgtcaactggtctatggagccaactatcacaaaggccaagttctcgtatataagatagaggcagatgggcgtttgtcctttgtcgatcaagatacccaccaaggaagtggtcctcatgccaatcaagcaagtccacatacccactatgcagaccttacaccagatcagtacctgatcacgtgtgacctaggaacagacagtttacatgtctatgatgtcagtgaggaaggaaaactgaccctgatcaatcagtatcaaacagctccaggggcaggacctcgtcacctggtctttcatcctcactataagactgcttatctcatcaatgagttaaatgctacgatcgatgtgctcttttatgacggtatgggtgaattcgaacacttccaaactgtttctacacttccatcagactacgatggtcaaaaatgggcttctgcgatcaagctctcagctgatggaaaattcctctatgcatctaaccgtgctcacaattccatcgctgtcttcaaagtcgtggctgatggtagcctagaactcattgaaattgttccaactcaagggctcaatccacgtgatttcacgcttagtcctgatcaaaactatttgatcgcagcccatcaagattcacctaatgccaccgtcttcaagcgggattctgctagcggaaaattgacccttctatccgacgacttctatgttccagaggccgtttgtacggtttttcattaagtcgttttagttgtcaaacctctaaaaaaatgattaaatagatgagaaaaaggcgcgagcctgacttcacaacttatattttaggagatcctaacatgaatccattggacttatttaaccaagtgaaagaaatgatcgaaaagaaagatttcgacgctgcaaagaaatttgttgatgacaacaaagacaacctcggtgactaccttgaacaagccaaagggcttgtatctggaaatgaaatggtcagcggtgccttggacaaaatcaaaggcttgttctaatagaactactcctcaacgctttagttgaggagtttttgtttataccaatcgcaaaaaagatccttgagaaaactcaaggatctttttagtctagtaaactagattatttcttaaggttgtagaatgatttcaatccacggtattcagctacttcaccaagttgatcttcgatgcgaagcaattggttgtatttagcgatacggtctgtacgtgaaagtgaaccagtcttgatttgtcctgcgtttgttgcaactgcgatgtcagcgattgttgaatcttcagtttcacctgaacggtgtgatacaacggcagtgtaaccagcttctttcgccatttcgatagcatcgaatgtttcagtaagagtaccaatttggttaactttgataaggatagagttagcacatttttcttcgataccacgtgaaaggtagtcagtgtttgttacgaagaagtcgtcaccaaccaattgaactttaccaccaagacgttcagtaagagctttccaaccgtcccagtcgttttcgtccataccatcttcgatagtgatgattgggtatttgtttaccaattcttcaaggtagtcgatttgttcagcagcagtgcggacagcagctccttcaccttcgaatttagtgtaatcgtaaactttgcgttctttatcgtagaattctgatgatgcacagtcaaatccgataaatacgtctttacctggaacataaccagcagcttcgatagcagcgatgatagtttctacaccatcttcagttccgtcgaaacgaggagcaaatccaccttcgtcaccaacggctgtttcaagaccacgacctttaaggattttcttaagtgcgtggaagatttcagcaccccaacggagagcttctttgaatgtaggtgcaccagcaggtacgatcatgaattcttggaaagcgattggagcatctgagtgagatccaccattgatgatgttcatcattggagttggaagaactttagtgttgaatccaccaaggtagctgtaaagtgggatttcaaggtagtcagcagcagcacgagctacagcgatagacacaccaaggattgcgtttgctcccaatttacctttgttaggagtaccgtcaagagcgatcatagcacggtcgatagcttgttgatcacgtacatcatagccgatgattgcttcagcaataatgttgtttacgttgtcaacagccttttgagttccaagaccaccgtaacgagatttgtcaccgtcacgaagttcaactgcttcgtgttcaccagtagaagctcctgatggaaccataccacgtccatgagcacctgattcagtatatacttctacttcaagtgttgggttaccgcgtgagtctaggacttcgcgagcgtaaacatcagtaataattgacatttcttactctccttattgagttatattttttactcctctatcatatcgtaattaggctattttttcaagaaaaaacaaggaaatctacgaaaattgagaagtttttaacaagaaaacggttccactatcttattttctgccatttcccctccttatttaattttttagcattcttctactcttctgctacgctttatgctatactaaacttatgacagatattaataaaacgattttagaaaaagctgctggtcctactcgattcaatccggatgagcagcgtcgatttttggagacttatgaggagcgggtgattgcttcatgcaccttggaggaggcaagggacaagatatacctggagcagtattcgacaatcctcactgatatttcagatcgctttcatcctgttttggtcaagatctccccagctttggatgaaaacagccagctacaatatttgaaaaaaaccaaggatcttggacttgtggcaagcatcgtttcgaatgactgtcgtcattctccctttggtctcatcatccatactgaccacccatctggaatttcaccaacagacatgaatctccagtatccaaatttatttgaaaagaaagaagagactgccagtccagaaaagaaatcattttggaaacgtctctttagctaaagaaaaaccaatggaagggaacatctcctttccattggttttttagtttgcttttatttttaaaaggttcccaatatttcgagcacaggaaatcagattcctttcagcatgagcgagtgcatctgctacctcacaaggaccaggtacgatagagaaggcagcttcaatgtgatgactaggaaaagcaggcaaatcctccgctaagctaccacaaatagctatcactgggatcttctctggtgttcgtttggccaccccgacaggtgccttcccagaaagggattggagatccatcctaccttccccaaccacgaccagatcagctttttgtactttgtgattaaagtcaatcaaatcgagacttttttcaattcctgaggaaatctgtcctcctgcaaaagcgaccaagccagcagccatgccacctccagctccggcgctaggcatagacaaaattcgtgcatcagctagctggtaaaaatcctgcatagcctgatcaacagctggaaacagaagcggattcaatcccttttgcccaccaaagatataggtcgctccttgactgccacagagaggattggttacatccgttaagacttggagctcgatgtcttctaaagcttttggaaccgcactggtatctattctagccacacgaccgagtgaagccccgacaggacgaagcagatggccttgttcatcatagaaggctatcccaagtccggctgccatcccaatcccaccatcattcgttgcagaaccgccaattcccacacagattgttttaactccttggtcaaccaattgcaaaataagttcaccaattcctcgtgtttccagttcaagaggatttcgtttttcagctggaatcgaacctaaaccgacaagagaagccatctcaaaaaaggccatctcatctttttggtagtaagacattgaaacaggctgtccaaatggtccggttacttgcgtttggtactcagttacatctagaactccagctagggtttccatggtgccttcgccaccatcccctataggaaggaggtcaaaagttacatctggtagagcctcttgaaatccttttttcaaggcttctgctacttgtttggcagataaggattctttaaatgaatccggtgctagtaggatatgcatgctgtttcctttctatgctggtctagaatttcaagaacaaggcttaaatccctcttctcgatacaatatggggctcgctcagcgacgattggcttggccataaaggcaatcccgataccggctgtttcaatcatcggaaggtcattggcaccatcacccatcgcaatcgtctgacttcgtgggacatgattttctttcgcccatgtcatgagagactcttttttcctttcaggagttagaatttcactaaggactttccctgtcaaatggccatcagaagactctaaacgatttgctaggactagatcaattcctaaagacctcgcgatggggtcgatgacttcatgaaatcccccggaaacaagaccaaccttgtaacctctttgatgcagttccgtgatcaaggtttcagcacccggcgtgacttccatctgttccaaaattttcggaaagatagaggtctctaatcccttcaataaagcaacacgcgcctctaaagatgctgaaaaatccagctcccctttcatcgcttgtgctgtaatctctgccactttttctcccacgccagcttcttgagctagtagatcaattccttcttgtcttatcaaggttccatctacatccataacgaggagacctgttacttctttcatcgctttcctttcttatttctcccttactatacaaaaatagggtttaaatttcaagtttcaatgatgatttgaagataaaaaaatgacctcctaaaaggtcatttttctgttattagaagcgaatttgctcgcgggttttttcataggaagtaacaaagcgatcagttacgccagcttctaccatttccaaagcatctgagataactttgaaggaagcagcatagtcatattctctttcgaaaatataaagggactcatcaaaggctgcctgtacatgatcatcaaatgaacggtaacggttcgagtattgcaacaattgttctgttaatgtcgcattttgaacaattcgatacgccgcttcttccaattcattcatatcattggtcaagatttccaacaaacgattggttgattcgatgttgattttatccccttccaactcatccatcaaagcttctgtattgttacttgcagtgaagaaaatttctaagaattcttgaggaattcctggcaagtttcgtttgtccatatagcgtttaatggcatgcaaacggttggcatagatgttgactttttggcgagcattggcatcgtctttttcaatttttgaaagggaatcacttaagccaatttgctcatcttcgatttctttcaaacgagcttcgatagcttctaactcttcttctacgatagaataggccttttgtgtttcagatgaatctttcaaggcatcttctaccacattttcttgtgaagatagctcagcttccaactcttttaactgttggctgaagctttcattcaagacgaatgttttaccgagacgttccacttctgccgcaagcttgctattgttatctttagcatgtttcaaatagccaggcagttgtttcactaacttcttcacaactttttgtgattcaatttcacgggtaaagatgtgatacaaagcatcgatttcttcttgaatttgttcattttcgtaaatggcattgtccaattcaagggcagatacatttgccatattgttcttcaaggaagcatgcaactgttggaaacgagattcaatatctgtttcagtgaagtggtaaccagattccaaaagcttgcggtagccactttccaaatcctctaattggtctggaagttttgcttgaagggcagtgacaatttctggcactcgctcaacaatttgttttaaggctacaatatgattttcagctgtatcaaggatttcagccgcttcaacagggtcacctgaagaattcaaggttacaaattgtgagaactcagattgaatatttccaatttgtttttcaatttcaggaagcgcactgccataacgatctgggtctgaagtgacttctttttgaagttcctcaaacatatccaaggcatgaaccacacgtccgctattcttttgttcctgctcttccagatcagaaagggctttgcgaatcgccttgatatcttcgtcgatcaattggatctgactttcgatattatcaatggcttgtttagccttcatgaaacggaaagaattgttatagccttccgcttcaaacagattgttttcaatatcagcaaatgaatttaaggataaatctacccatttttgattccattcacgaaatgcaatttgactttgaccaatcaaatgcatgttttttacggcctctacttcatcgttgaccggaaggttgtataacttttcttttcgttcttccagtgctgccagtaaggcttcatttcgttttctcaaaatgactgcaaccacatatcctacaatcaagataagggcgacaataaagatgagaacaattagtccactagacatataaaaactccttcatcgtattacttgaacgtaatcctagtaattataccataaaatatccattaatgggaagcgttcggtgaattttatacatcgagtgtactatattcagcgttttcttcgataaattcacgacgtggttccacgcggtcacccatcaacatatcaaagatcttatctgcttccgcagcatcgtctactgatactcgtgccatcaagcgatgttctggattcatggttgtttcccataattggtgatcatccatttctccaagacctttatagcgttggatggttggttttgagcgaccttctgaataacgttccaaagctgcagctaattcggcttcttggttggcaccaggttggatatattctttgatttcactaccgactttgaccccatagattggtggttgcgcaatataaacatatcccgcctccaagactggtttcatatagcgatagatcaaggtcaatagaagggttcggatatgagcgccatcgacatcggcatcggtcatgatcactaatttttgataacgcgcttttgtaacatcaaattcggcaccaaatccagttcccatagcagtaaataaactacggatctcttcattggctagaattttgtccatacttgctttttcaacgttcaagatcttaccacggattgggagaatcgcttggaattcccgatttcgaccagattttgcagatcctccagctgaatccccttcgacgataaagagttctgtttcttgtggattgtttgaagaacaatctgccaatttaccaggtaggttggaaatctcaagccctgatttcttacgggtcacctcacgcgctcgcttagcagctacgcgagctttcgccgctaaaatccctttttcgacgattttcttagcaatttgcggattttccaaaaggaaatcagaaaaggcatcactaaagagtcgattggtaattttaacaacttctgaatttccaagtttggtcttggtttgtccttcaaactgtggatttggatgtttaaccgagatcactgctgttaagccttctcgaacatcttccccagttagattgtcttcgttttcttttaagagtttatttttcttagcgtaatcattgatcacacgagtgagagctgtacggaagccctgttcatgcgttccaccttcatgggtatgaatgttattcgcaaaactcatgaccgtctcatggtagcctgtggtatattgcatagctacttcaactgtaatatcatccatttcaccatctgtgtagattggtttttcaaagatgacatccttgttttcattgatgtattcgacgtaactagagatcccaccttcgtagtggtaatgcttttcttgctctaagccttctcgcttatctgtcaaagaaatacgcaagccacgattcaaaaaggctaattcttgaatccgtttatttaatttgtcaaaatcatactcggtggtttccgtgaagatttctgggtctggaataaagtggacggttgtccctgtccgatctgtctccccgatgactttcaaatcatccacaacgtgtccacgtcgatactcttggtaatagatactgccatttttatagacgcgaacatcgagggatgtggagagggcattcacgacggatgaccctaccccgtgaagaccaccagaaaccttgtagccgcctccgccaaattttcctcccgcgtgaagcacggtaaagacagtttcaacggcaggtcgacccgtcttttcttggatatccactgggatcccacgaccatcatcgacaaccgtgatcgaattatctgcttcaatgaaaacttcaatatggctagcaaaaccagctaaggcttcgtcgatcgagttatccacgatttcccagaccagatgatgaagaccttcttttgaggtcgatccaatatacatccccggacgcatccgaacggcttctagtccttccaagacctgaatctgactggcatcatattcttgtgcttgattttcttgctgtttatcctctgtcataatttcccttttctattcaaatataaactggtgtaagtgtggcatggaatcaaataaataggtcgaaagccctgcagccttcccagcttctatatcgatcggacgatctccaatgaccagaccgtcttgaatgccatattttcccttcaaataaagcatagaggctgggtctggttttcgaggaaagccctcgtctgctgtcacaatctccgtaaagtagggtgcaatgcctgtctgttcaataagggtcaaaacttggcgatcccgatgagataccaaaaaatggcgtcctccatgtgcttggatctcttccagtaactcttttgctccctcaaataagaccggctcttgcaagcccaaggcttcttttttcttgtattccgtacgaaaattggaaatatgaggtgcaaaggtttgaattgcatcctgtgttgagatttttaatgctgcataaacagaatcatgatcggcttggatgtgaaagtccttcaatgtcgctacaaaggcatttgtggacgtttcgtaattatccaatagcgtcccaccaagatcccatataaaatcatgataattcatagtcaatattataccacaaatggacaaaaaaaataagctaaaaccctcatttaggggggattttagccattttttacggtcatttcattttaaatcatagagaagtcattttccgtcatagaatgtaaactttcaccagaaaatatggtgtccaaaagagcaattttaagcatctccaaagacatcttgatagagcattccttgacgaaggctttgggcatctcctccaaactgctctaccaaggcataggctaaggcaagcgcagttgaaggaccacgactggtcaagagattaccgtctttcaccactgtttctttctgatagtgtccatcttgaatctcttcttcaaaaccatcgtaacaggtatagtttttatcttttaagaggccggcacgcgccaagacaattggtgctgcacaaatcgcagaaatgatttttcccttcctactttcttcttgaagagctgcaatcaattccggattatcccgcaaattcgcggctcctggcatcccacctggtaagaagattccatcataatctgacagatccccattccagaggcggtcgacttccactgtgatctggtgagaacctgtgaccgtttcttccatgccaacgaggtcacagtcgatcccagcacgtctcaaaacatcgacaatggtcaaggcttcaatttcttcaaaaccgtttgctaaaatcgttgctacttttttcattttcattccttctttctactattgcgcctttttaaggactacttttttacggattggaacctcttcttcgggctctttctttttgctactatgattatatattgagaggaccagaccaataccaatcagattactaataatagacgatccaccttgtgagataaaggggaggggaattcccgtcaaagggagaagacccattaccgctccgacattttcaaaaatatgaaagaccagcatcatgataaatccaatggaaatataggtataaaactggttattagactgaagggtgatttttaaaatgcggtaaatcagggacacatataagatcaacagcaccagagctccaacaaagccaaagtcctctgctactaccgtaaaaatcatatcgctttcccgtacgggaaccaataaattggagacattaaagccttgaccaaagaggccaccacttgcaatggctagctgtccttgtgcctgctggtaggtggtggtttgtgcatagtcaaaaggatttaaccaggctaaaatacggttcatctgataggttggcatccctacttgctggtgcagaaaagctcgccccccttctgaaagaaagaggaagagaaagcctgctagcccacctgccagaagcaagatgaccggcaagataattttccaggaaactcctgaaacgagcactaagcccgcaaagatggccaagaatactaaggccgttcccaagtcctgctggagagccaataaggcaaagaccggaatcgtatagatggtcaactctagaatcaaaaaccaatcttgtcgtaataatcgctcacgccccttatttctttgtaaaaatcggacaatagagcgtgacagcatcaggatgaaagggatcttcataaattctgaaggctgaaataaggtgatgttcccataagccacccagtttttagctcctgttgaagctaccaagttgggattataaaaaacaaggggaagaaccatcaaggccagaccaagcaggtaaagaaagggagtgattttccaaagaaatttcgtgctaaaaatcgtcacaatcaggcaaatgacgcatcccacaccaatccaggccaattgctgccctaaaaaaggccacaccatttggggatagtcatgagaaactgctacataaacagataaaatcccaatcatgagaagggcgaagacaatcccaatgatcgaataatccaggtgaatcgtccaaaaatgatgtttcttcattcacgttcctttctgtgagaatcatcaaatcaattaatagaacaacatttgtagaatcaagctagatcctgctacacaaaaccaagcaatcaaccctactaggaggggggctgctcctgctgcacggaactgtttccaagaaaccttgcttccgattccaaccaaggccatggccataaagaggtgagaaaggtcatttaggtaaggtaggaccactttaggtaccaggccaatagaagaaagaatggaagccacaataaaccagataataaaccaaggaataattttctttaacattcctttgtttcttccttgttgcttgctccgataccattttaaaccgatcaagctcaaacaaactggtacaatcatcagagcgcgtgttaacttaacaattgtagccatttgccccgctgctttactgtacgaaaatgctgctgctacaacagatgacgtatcgttaatggctgttcctgaccagagaccaaattggaaattagacatatgccataaatgccctaatactggaaagataaagacagccaaaatgttgaagaagaaaatagttgacatagatagggcaatttcctcttcgtctgcttcaatgatcggcgctgctgctgcaatagcagatccaccacaaatagctgtaccaaatccaattaaggtccgtaggtgagatttcagatggaagactctcccaaagatcatcgctgcaagaaaggcaactgttatcgttggcagactaatcttcaaagaagacaagccggtagaggcaaccgtcgcaatcggcaagctaaatcccatgaagataatcgaatactgcaataatttcttaccggaccagttcagtcctggtcgtgaattctctggcaaatctactaattcattgaggacaattcctaaaatcaaagcaaagacactggagccaatgatgggaaagaaagttcccaataacatggcacaaagagccagtacaaatgcaattgcaagtccaaatcctttatttttcattctctcaattcctttcaaaaaagtcagctgcttgctcaacaagccgctctctcactgtcgtgtgaaggggcaacacttgctgcaagccatctaaaatttgttttccatatcgtttggtcaccacccgctggtccaataagaggaccaacgattcctgatcttgaaaacggctggttctcccaatagcctgtttgagccttaaaattgcgactggaagactatagtcataaaagggatttttcccctgttctctgagttgggtattcagcttttgaaccatataatctttagggttgtcaaaaggaaggcgcgtgatgatttgaatcacttctttttgttgggaaaaatcgactccctcccaaaagcttcctgtacccaataaaatagaggtttctcctcggtcaaatcgtcgcttaatattagctgcatcgccatttcgatactgggccaaatgaggaaacttcaaggcgtttgacgtctccagtaacaattcttttgaggtaaacaagagaaaaattggttttcttagaggaaaaagttcatcgatgagctgacaaatctctcctgcatactccacggaagataaagaaacgacatctggaaaatctatcggcaccaataattcctggtgttgtttgactgttattggcacccggtagatctgctgctcttggtatcccaaaagggcaggtaaatgcacctttttgctgatcgcgatcgtcgctgatacaaagagcacgggcacttcttcaggaacaaactccttaaaggatagcaagtcctcaactcctccgtggagacgaagaatctggtggctttcgaccacttctttgtccatccaaaaggtttggtagcgctcatcaaacaattcccttagattctctaatgattcgttttttaattctgagacatcctgtcgaatttttgctaccgtttgatcagataagatcgctgtttttccttgtacaacttccttagagcaggcatttaattcaaattgaatactttccagcaaacgccgttgcagaagatctttttcctcttcgatggcatgttgcaagcttaaaagaagagattgcaaggtttcttctctctgtgaaaactgttctaaagcaaagaagagtttttgcgcttcatccactaccagaacagattcttgaagtagactcttatcatcctctagacgagttaacagataggcatgattggtcagaattacccggctggttttcactttttcctggccgagacgccaaaaatcttcctgataaaatagtgaacgtttcgacaattgaccatcgtggcaaatggcagctacaaaatggacatgacgatagagttgaccaatttcactgaactctcctgtttcagtcatggttagccaaaccaacagttgcattttaaagcgtcgaatcatcccattatctgactcactctgtaaggtctcataaaatttatcgagttggatgtagtccttgggacttttaaggctatgaaagggaatttggaaaagatcctggatggtctttccttctttcctcataatttgatcctgaagaattttagttggaacactcacaagaatgtgcttggaggttttagccaaaagcgttaacagataagcgtaggtcttcccgatacccgttggcgcttcaataaaacttggaagtggctggtgcaaactgtcctcgatataggcaacaaattctctttgttccggataagcctccattcccaacagctgcatattgagttcaaactgttcagacaaatgacgactttctaaaaactgctgtggcttgcgcagatagagaccatgaacttctactaaatgagctggtaaaaaaaggctactgtcttcaagcgcatcttctattaagagtcgtgattcataaatcaaacaatctgccatcgaaagaagtttttcgatcaatcctcttggcaagttcgcaattttctctctcaatttcaacagcagctgggctgttgccatagcatccgctagagcggagtgagcatggtgcaactcaatttccagttcagccgcaagagctcctaaattgtagcgttctaaagtcggatagaaaatttgagacaattcaaccgtatcaatccgaggagtcgttagttcgaatccttcccaaaagagagcttctgccaataaattcgcatcaaatttgacattatgagccacaaagacggcatcttctattaattcaaaaatttcttttgccacttgtgcaaactctggtgctttccgcaagcgaccatctgtcaggcctgtcagttgtttgatatgctcatccaatcgttcatggggattcacatccgtctcataggattgcgtaatcctcccatcttcgatgatgacaatcccaacctgaatgatcttagcattgcttccagcactggtcgcttccaggtccacaatggcatatttccgtttctgtcttgtcataatacttaaaattatatcacgtttgagcaagctctgcagatttttttctcctttgaggctgacttcaatccagttattttcttcgcaatttgatacactattctagaaaggagtccttatgaaaatctatcgtactgtaaatcctgtagcttatgaaaacacctactaccttgaaaatgaacactccctcattcttgttgatccaggtagcgactgggcgactattcaaaaacaaattgatcgcgtaggaaaaccaattgtagcgattcttttaacccatacgcactacgatcacattatgagtcttgaaaaggcccgtcagaattatcatttcccaccagtctatgtccattcggcagaagccagttggttgtcttctcctgtcgataatttatctggtttggatcgtcatgcggatttagaagatgttgtctgtcaggaggccgacttcctttatgacattcgctccgattacgaaatagccgatttccacttttatgttctagaaacaccgggccactctgcaggaggagtctccatcgtctttcctgaggatcacttggttctatccggtgacgccctttttcgcgaaaccattggacggaccgatcttccaacagggaacgcggcacagttgcttagcagtatcagggaagagctctttacccttccatcttcctacactgtctatcctggccatggccctgaaacttctatcggtcacgagaagatgttcaatcccttctttagacaatcctaaagagtccttatcatccttcctgtcctcatagaagtagacaaaaaaagcaagtgtaaacttgctttttttattatatcttaagaaaacgtctcatggagattgaagaaccaatcgccccaatcaaaattcctaatccaaagaggccaccgaccatgatcggtaccaagagatgaggactatagagatacaagttttggtctgccaaattattgttcatagatgtatagacaacattatacacatagaagaccaaagctgaaggaaccaaggctcccaagagaccgatccaagcaccttctaaaaggaatggtgcacgaatatagccattttttgctcctaccagtcgcataatcttaatctcacgactacgtgaaatgatggtaatccgaatggtatttgaaatcaagaagactgcgatgaagatcaataaagctactccaatcaagccccagtttcggatgaaggttccaagagcaaacaagcgttgggtatcgaccccaccatctttaacctcagagaccccttcaatttttttagcatcagccgaaacttgctttacatatttaggagccgttgtctctacataataagcatcatagagaggattggcatctccatcaaaaatcttccagttgttcccagccgttttgatcagtttatcatactgttcttccttgctagaaaaatcaaccttatcgacatgcttcatggctgtcagagcatcatagaccttatggtagttttcattggtcacggtttgaccgtctttttcaatctgctcgctctgatcttgaatatccttgcgcatgtatactacaacccgcacactgttttgaatatcatctgaaagcttgatggtattggcaataactgaggcgaaaatagcaaccaagctaagggtaatcataaccgagctgaccgctgcaatcgtcatccaaccatttcgtttcaagcttttaagcgattcgattaagtgtcggaaaaatcttctaatcatcgtatccgtactctccttccgcttcatcacgcactacacgaccattttcaatcgcgatgacacggtgacgtaaagtatttacaatctggctattgtgggtcgccatcaacactgtggtcccttgtagattaatccgctccaaaagattcatgatttcccatgaattatctgggtccaagttacccgttggctcatccgcaatcaagactttcggattgttgacgatcgcacgagcaatcgcaatccgttgttgctctccccctgacaattcattcgggaatgagcggaccttgtgtttcaatccgacaagatccaaaacttccatcacacgctttttaatattgcgacggcgctcaccgataacttgcatagcgtaggcaatattttcataaacggttttctttggaagcaatttataatcttggaagaccactcctacattgcgtcgcaacataggaatatcgcgttttttgattttatccaaatcaaaatcagctactttcaaacttcctttatcgtgtttgacttcacggtataaaagtcgaataaaggtcgacttccctgcaccagaaggtcctacgatgtaggcaaattctcctggttcaatttggacagagaccccgcgaagggccgtcgtcccgttgtcatactttttgacaacatctttcatttcaatcattgacatgtaatgaaattcctttcattcttttctggttgattccctcgaggttattggagacgccatttaaggtaggcatcgataaagccatcgatatctccatccatcaccttgtccacctgcgctacttcgtagttggtccggtgatccttaaccatggtataaggggtaaaaacataggagcggatttgacttccccaggtgatttcttttttatccccttttagagaatccacttctgctgcttttttctcttgctctaattggtagagtttagcttgcaacatcttcatcgcacgatcacggttcccgtattgggtccgatccacggtggatgccactacaatccctgtcggaatgtgggtcaagcgaacccctgtagagaccttgttgacgttttgtccaccagctccaccagagcggaaggtgtccatcttgatatcatcatcacgaacttcgacttcaatggtatcgtctaattcgggcatgacctcaacagatgtaaaggaggtatgacgacgtttagcggagtcaaatggagagatccgaaccaaacggtgtacccccatttcagatttcagaagaccgtatgcatgtggcccttcaaaggatagggtcacagacttgattccagcctcatctccagcctgatagtccaagacttcaactttaaagccgtgagcatttccaaaacgagtatacatccgaagaagcatgtcgccccagtcctgagcttctgttcctcctgaacctgggtggatttctaagatggcattattattgtcatagggttcagacaatagcaaggtcatctcatagctggtcatacgtttatccagctcctccaacttctcgatcaattcttccttgaccgaatcatcttctgccaaaaagtccagtaagatttctgactcatcaaagagatccaccatttgatggaaattttcataggtctgcttgagttcatttaattcttgagatgtcttttgcgcagcaatgttatcatcccaaaaatcaggttctgtcattttattttctaaaatggcaatttcttcttccaatgcctctaagtcaaagagaccccctgaaagaagctaatttttcacgatttgcgtcaattttttgacgaatttctgaaatgtccataagtacctctttctatgtatctagtctattatatcataaccttcactatttgcccaccttccaatattggatctgctggttgacaactgccaagccagctgattttcagcattttttctattcatttgtaacctaattgttagaaaaaaagatgctcttatgctagactggtagcatgacaacagtagcttttatgtccgatttacatattgattcaaacaacttcgtcaaagaagaattagagactctgatcactcttttcaaggacaaaaaaattcaacatctccatattgcaggagatattgccaacggctttgaaaagacgtcacaggaatttttagaccaacttcaatgtcaccttccagtgacctttagcctaggaaatcatgatatgctgggcctatcagaagaagccatgagaccttttgaatttcaaaagattcccttctccaatcatacgcttcttgctttttcgggctggtatgactacagctttgttcctaccgtctctccccaaaaacatctccaaaccaagaatctattttggtttgacagacgcctccaacgaatgggatccgatccagccattacccaacgtctgttgcaagagctggaacaagagctcatgcgtatagatcaacccttgattattgctatgcactttgtgcctcatagtcaatttctcctgcgctacccttattttgaacgcttcaatgcttttctagggagccaagcctttcatgagctttttcggcaattccctgtcaaagatgtcatatttggacacagccaccaccgaatttcagataggacaatcgacaccatcacctatcatgccagacctttaggctatgtccgagaatgggagctttgcaaacaatttttcgaagcttttcctgaatatgattttccaaaacgatacgatccctacaaacgctatcgcagaatcaaagacctccccgaatttaaagcatacaagaaaaaacagctcgctcatgaattttctcaagccatgaccatccttgaactataaaaaaattggtcccttcggaaccaatttagaatgtagacaaactattttaaagtaaaataagttaagcgattctgcaaaaaaataaataagttccaatttttaaatcgatcgagaaaataccgaaactttccgctgtgagaaaagtgcctgaaacaataacatttcaggcactcggaattattgagaccctaggctcaataattagtcatgaaacttcgaagaagttcgctgacatccgtactcacctaaggaaagttttttatatgactttgttttcaatctgaattggctccttcggaaccaatttttttactcttcagtatccaagagattttttgcaacgattgcagccagaacaccaccgacaattggagccaagataaagatccaaatttgttgaagggctgcaccaccaacaaagagggcaggtgccaagctacgagctgggttaacagaaagtcctgtaatgttcaaaccaacaagaataatcaaagtcaagctcaagccgatcacaagaccagcgatcttgccattacctttgctagctgatgtcactgtcatgatgaccaaaataaagataaaggaagcaattacttcaaacaagaatccgccaaatggagtcacacccttcgctagggcattttcaccaagactagctgttgacatacctgaatttgacaagaggaagagtactgttgcagatgcgagaaccgcccccactacttgagctgcaatataattaaccaagtcctttgaagacaagcgtttgttcacaaacatggcaatcgaaacagccgggttcaagtgggcaccagaaacagtcccaattgagtaagctgctgcaacaatggataaaccgaatgccaaggcaattcctaaatgtcccagaccttctgtcccatttccaaaaacaactgcgccagtcccgataaagacaagcataaatgtgccgattacttcagcaaaaaactttttcataactaagtttcctttcttcaaactgttgactagtttatcaaaaatccacacgtacctcaagaaatatgcccagtctattttgcccgcaaaaaaagccatccgaagatgactttttttatgcttaaatggcatttttatcttttccaagtacacgttgaacggctttgacaatctcaacgagaacaacaatcaagagcgaaccaatcataactgctaaccattgtgtcaaactcaaatgagagacatggaagagtttgttaaatccagggacaatgatggtcgccatcaagagaacaaaggcaacaggaatcgaccagttaaaggtcttgttcttgaagagtcccactttaaagatggattggtaaaccgatttaacgttaaaggcatggagcaattggatcaaaccaagagttgcaaaagccatagtcaaagcatctgcatggatttcggcacgagtcgcatgttctggatagagtatggcccagccataaacaccaagaaccagcatggtttggaagacaccttgataaagaatagctccgaagactccgccatcaaagaagttggatttacgtccacgaggtttgtgggtcatgacacctggctcagctggttccacaccaagagcgatggctggaagagtatcggtaaccaggttaatccagagaagatgtactggttgaagaacatcccatccaaagagggttgcaaagaagatggtgaagacttcagccatattggcagacaagaggtattggatagatttttggatatttgagaagaccttacgtccttcttctaccgctacgataatggttgcaaagttatcatctgcaaggaccatgtctgaagctcccttagaaacttctgtaccagtgatccccataccgataccgatatcagctgtcttaagtgatggcgcatcgttgactccgtcacctgtcatggcaacaactttaccttctttttgccatgcttttacgatccgaaccttgtgttcaggtgatacacgagcataaacagagtattgtttgaagaccttttggaattcttcatcagagagttcattcaactcagctcctgtaaagacgtgatcttctgtgtcatttggatcgatgataccgagacgtttggcaatggcttcagctgtatcttggtggtcacccgtgatcatgattggacggatacctgcttccttagcgacacgaacagcttctgctgcttctggacgctcagggtcaatcatgccgaccaaaccagagaagatcaggtcagactcaacaatttcagattccaaggtagggatttcgttgcttgtcttataagccatcatcaagacacgaagggcttgtttagccaagtctttgttggtagcaaggatagctttcttatcttcatctgtgataggacgaacttccccattgacttcaatacgtgtcacacgtttgagcaattggtcaggagcccccttgacagcgataaagtaagaaccgtctgcttccttatggatagtagacataagcttacggtcagagtcaaatggcaattcagctacacgtggctcgtccttcaagacttcacgaacgtcaaagttatgatccaaaccaaactgtaccaaagcagtctctgttgggtccccaatcaacttgccagatggatccaccttagtatcattggcaaagttcatgatacgaagggtattgttgctagcagcaatctcagctgctgagctttgcaattgaccgttggtgtagaccttctcaacagtcatttggttcatagtcaaagtacctgttttatcagatgcgatgatttctgttgaaccaagagtttcaaccgctggtaatttacgaacaatcgaattgcgtttggcaagggttgtagttcccaaagatagaacgatagttacaatggcaggaagtccttctggaatggccgcaaccgcaagggctaccgcaaccatcaagccttctaatggatgctctccacgaacgaagacaccaactaagaaagtaatgaccgcaatcacaacaattaagtaagtcaaggctttagataattgttccaagctttgcttcaatggtgtttcagtctcatcggcattagccaacatatctgcaatcttaccaacttctgtatacataccagtgtttgttacgacaccaataccacgaccataagttacatttgagttttggtaacccatattaacgcggtccccaataccagcatctgcttcaacaagtcctgtcacatctttttcaactggcacagactcccctgtaagagctgcttcttcaattttaagagaagctgcttcaaacaaacgcatatctgcaggaaccacatctccagcttccagaagaacgatatcacctgggaccaattctttagaatcaatttcaatcacgtgaccatcacggcggacacgcgctaatggactagacatgtttttcagtgcttcgatagctgcttcggcttgtccttcttggtagacaccaaaggctgcgttcaaaacaacaacggctaagatgatcatggcatctgtaaggccgtccattccttctgtgatcacagagagagctgcagcgatcaacaagatgataatcatcaaatccttaaattgatcaaggaatttagctagtaggctacgtttttcaccctcttccaactcattacgaccataattcgctaagcgttcttgagcctgggcggttgacaaaccttcgacagatgagtccaagttctttaggacttcctcagaagattgcgtgtaaaacaaatctttattttgttcttttgacaaaacagtctcctcctttttggcctctttttacaaaaaaagagacctgttttttaaaaaaacaagtctcgctgtttaatatagtgccggaaataattcgtaatgacgacactatcgcggaaaaccgccagctactcccttgagtggttttattataccatttttatagaataaagcaagcgggatctcgaataatttaatgaggattattcttcccattccaccagtaattgataattggcaaattcctgttctccatcgagggttaacaagcgataagagacttgcaaatgacctgcttctaattgaaagaggtctgttgtaatcaaaaactgctgaatgcccatcggagttgggatgattgccccaccatcttcatttttgtagaaacgcatgatggatttaggacttgagaatcgtgtcatcaccaattcatcgttggaaaatttcaaagcaaccttttcatcttcttcattggtatacaagagatattgaaaacctgctttttccttccattcaccttgatagtactgatcaacgatttccatttcttctccaaatcgaatggtattttgaatgcgaatctgcatctttgtctccttctcttcttttcttgccctactattctatcaaattttacgcattttgactgcccctattagcctctagatcgcaaaataggcttttttttgctataatagacccatgaatgaaaaagtctttcgcgatcccgttcatgattacgttcatgtggatcatcccatcatttatcaattaattaatagtaaagaatttcaacgactacgccgcatcaaacaactggggacatctggttttaccttccacggtggggagcatagtcgtttttctcactgtcttggcgcctatgaaatttcaagacggattctgtctattttcgaggaaaagtatgcagagcaatggcattctgatgaaaacttactgaccatgacagccgctcttcttcatgacattggacatggtgcctattcccatacctttgaaggactgtttgggaccgatcatgaaaaaatgacccagctgatcatcaccagtccagagacggaggtcaatcagatcctcttgcaagtggctcctgatttcccaaatcgtgtagccagcgtcattgatcatacctatcccaataaacaagtggtgcaattgatttctagtcaaattgatgtggaccggatggattatttactgcgggatgcctattttacaggtgcttcctatggaaaatttgacttgacccgtattttgcgcgtcattcgaccgattgaaaatggcattgccttccaacaaaatggcatgcatgctgtcgaggattacgtggtcagccgttaccaaatgtatatgcaggtctacttccacccggctactcgtgccatggaagtcctccttcaaaatcttctcaaacgagctagaaccatttatccagatcagaaagagtattttcaactgacttcacctcgcttgattccattttttgaagaagaagtcactatccaagactacctaaatctagatgacggtgtgatgaatacctatttccaagtctggatggatagtccggataccatcttatctgatcttgctcagcgctatattaatcggaaagtctttaaatcgattctatttacagaagataagcgaaaagacttagcaatccttgaaaaactgattaaagaggttgggtttaatccaacctactacacagctattcatcaaaattttgacctgccctacgatatttatcgaccagagcttgaaaaaccgcggacccagatcgagatgatccgaaaagatgggagtctcgctgaattgtctcagttgtctccactcgtcgctgctttagcaggaactcgctatggggacaaccgcttctatttcccaaaagaaatgctggaggttaatggacttttcagtaagcaagtagaggaattcacttcctatatcaccaatgattattttacaggagagacggatgtccattaaattagtggcgatcgatatcgacggtacacttctcaattcaaaaaaagagatcacaccttccgtatttgaagccattcaagacgctaaagccgcaggcgttaaaattgtgatcacaaccggtcgtcctatcgcaggggtctcaaaacttttaaaagaactccatttgatggatcctggagactatgtcattacctttaatggcggtctggtgcaagaaactgctactggaaaagaactcatcaaagaccttttagattatgaggactatctcgatatcgagtctcttgctaacaaactccaaatccactctcatgcgattactaaagacggcatctataccagcaatcgcgatatcggacgctacaccattcatgaatctcaactggtcaatatgcccctttattaccggacgcctgaagaagttcgtgagaaagaatttgtcaaggccatgtatatcgatgaaccagatattctagatgctgcgattgcaaaaatccctaaagaatttaaggatcgcttcacgatggtcaaatcagctcctttttatttagaaattctaaggaaaacaaccaataagggatcagctgttcttcatctagctgaacgacttggaatccagcaagaagaaaccatggccatcggagatgaggaaaatgaccgttccatgctagaagtcgtgggacatgctgtcgttatggaaaatggcaatccagctcttaaaaaaattgctacaactattaccaaatcaaatgatgaatctggcgttgcatacgccattagaaagtgggtattataagaaatgtaccattaccagctaggaatttctgctagtgagcatgacgactttgttattcagagtgaccaaaccaatctcttacaaagcagctcatgggcaaaaatcaaagataattggggaaatgaacgggttggtttttatcaagaagaccaattagtcgctgttgcaagcatcttgattcaacccctgccacttggcttttctatgctctacattcctcgaggccccatcatggattaccaaaacaaggagctggtttcatatgtgatccagtcccttaaaaagatagccaaacaatacaaggccttgtttgtgaaatttgatccaagtcttttcttgagtaaacacttgattggacaagaacagtcggaagctcctgctgtgcaagaagtgatcgataccctaacaaaagaagggattgaatggactggccgaaccagtgatatggcagaaaatatccaaccacgctttcaagcgaatatccacaaagagtttttcaccgagctagacctttcaaaatctactcgacaagccatccgaactgctcgaaacaaagggatccaagtccaatttggcggaaccgaattgttagaggactttgcttctctcatgaaaaagactgaagctcgtaaaagcattcatttgcgtggaaaagactactacgaaaaactactcacaacctaccaaggacaatcctacattactttgtctacgctagatctcgagaaacggaaaacctcccttacaaaagatcttgaaaaaaacaaggcagaggctgaaaaattcacagaaaaaacaaagcctggcaaggttgacaataatcaaaaagaaaaagagcggatagaggaagaactgcaatttcttgaacagcatctccaagcaggtaaacaggtcgttcctttatctgggaccttaacccttgaattcggtggaacgtctgaaaatgtttatgcagggatggatgaagaattccgccgttaccaacctgctatcctcacttggtatgaaactgcccaacacgctttcgaccgtggtgcttcttggcaaaatatgggggggattgaaaattcactcgatggtggtctctatcatttcaaatctaaatttaatcctgtcattgaagaatttgttggggaattcaacctcccaaccagtccactctatccacttgtaaacaaagtctacaagatccggaaaaaattaaggagtaaataagttacatgactcttacgacaatttcaaaagaagaatttacctcatttgcaaatactgtctcccatcgctcttttatccagtctgctgaaatggcagatctgcttgaaaagcgaggaaacacggtccaatttatcgcttggaaacaagaagaccaagtccaagtggcagcaatcttgtacagtcttcctatgacaggtggtctccatatggaaatcaattctggccccctttaccaagaggaagctatgctagaacctttctatgcagctttaaaagactatgcgaaagaaaatggggctattgaactcgttattaagccctatgatacctatcaaacctttgacagtgacgggaatccaaccagtgaagaacaaacccattttatgaataccctaaaaaaattgggctatcagcatgatggtttaacaacaggttatccaggtggagaaggtgattggcactatgtgaaagatatggagggcatcaccgaaaaaaatcttctcaagagcttcagtaaaaaaggaaagccacttgtcaagaaagctaaatctttcggtattgaactgaaacgattaaaccgagatgaactgcaactctttaaggatattacttcctctaccagtgaccgtcgcgactatcaggataagaccttggattattaccaaaccttctatgacagttttggcgacaatgcagatttcatgatcgcaacactgaacttccaccattactacacaaatcttgaaaaagaccaaggaaaactagcacagaagattgagaaattacagaaggatcttgaagtcaaccccaattcagagaaaaaacaaaatcaacttcgtgaattctctagccagtttgatacctttgaggtgagaaagaaggacgcaaaagaatatattgaaaaatatggagatcaagacgtcattcttgcaggtagcctcttcgtttatatgccacaagaatccacctatttattcagtggctcttatacagaatttaataagttctatgctcctgctgttctccaagaatatatgatgcttgaaaccatcaaacgtggtatcccaagatataacttcctgggtattcaaggaatcttcgacgggtcagacggtgtgcttcgtttcaaacaaaacttcaacggctacatcgtccgtaagatggggatcttccgttattacccaagtcctctgaaatacaaactgatttctctcattaagaaactattaggacgttcctaactcaaaagaccagctttgtagctggtcttttctactataaaaaaaagacgagagccctctcgccttttagatgtcattatttaacgaagtcaagcaatgccaagaagctttctggatcaagtgatgcaccacccacaagagctccgtcaacgtctggacaagccatgtattcagcaacgttttcaggtttcactgaaccaccgtattgaacacgtactttgtcagccacttcttgaccaaagtcagcagctacaacgtcacgaacaactttacacattttttgtgcgtcgtcttgtgaagctgatttaccagtaccgatcgcccagattggttcgtatgcgataactgttgaagcgacttgttctgcagtcaatccagcaagagcagctgaaacttgagctcctacgaattctgctgctttaccagcttcgtaagtttcaaggctttcaccacaacagatgattggaagcataccgttcgcaaagattgcttttgcttttttgttgatatcttcatcagtttcatggaagtagtcacgacgttctgagtgaccgataacaacgtagtcagtaccgatttctttcaaaacttgtgggctagtttcaccagtgaaggcaccagcattttcaaagtaagtgttttgggcagcaactttaaggtttgaacctttagcagcagcaagaacagttgtcaagtcaactgcaggagctgcgataccagcttcaacaaggtcagctgaaggaagttttgatgctacagcttcaacgaatgcttttgcttcttctggatttttgttcattttccagttaccagcgataaatggtttacgtgacatttcacatacctcttttttctaattttatactatctattttaccataattttcgtcataatgaaaggttgcacaagatcattttactttttaccaaaataaaaaccccgtcttcacggggttttctgtctgtctatataattgttaatctgggaactagatcgaattaagcttcgatttcagtaaccatacctgaaccaacagtacgtccaccttcacggattgagaatgtagtaccttgttcaacggcgattgggtggatcaactcaacgtcgatagtcacgttatcaccaggcattaccatttcagttccagctggaagttcgatagatccagttacgtcagttgtacggaagtagaactgtggacggtagttgttgaagaatggagtatgacgtccaccttcttctttagtaaggatgtaaacttcacctttgaatttagtgtgtgggttgattgaacctggtttagcgataacttgtccacgttcgatttcatcacgttggataccacgaagaagcacaccaacgttatcccctgcaagaccttcgtcaagttgtttacggaacatttcaacaccagtaacaactgctttttggatttcgtctttgataccaacgatttcgatttcatcgttgacacgaacaacaccacggtcgatacgtcctgaagcaactgtaccacgtccagtgattgagaatacgtcttcgactggaagaagcaatggtttgtcagtatcgcgttctggttctgggatgtactcatcaacagtatccatcaattccatgatgatgtcttcatatttagagtcaccttcaagagctttaagagctgaaccttggataactggaaggtcatcacctgggaaatcgtattctgaaagaaggtcacggatttccatttcaaccaattcaagcaattcttcatcgtcaaccaagtcaactttgttcatgaagacgatcaagtgtttaacaccaacctgacgtgaaagaaggatgtgttcacgtgtttgtggcattggtccgtcagttgaagctactacaaggatagctccgtccatttgagcggcaccagtgatcatgtttttaacgtagtccgcgtgtcctggagcgtcgatgtgagcgtagtgacgtttagcagtttcgtactcaacgtgtgcagtgttgatggtgataccgcgttcgcgttcttctggagcagcatcgatagacgcatagtctttaggttggttaactgatgaaggcaagcgacgtgccaaaacagttgtgattgctgcagttagggtagttttaccgtggtcaacgtgtccgattgtaccgatgttaacgtgcggtttactacgatcgtatttttcttttgccatttgagtaaaagcctccaataaaatatattttatagatagacagtaggcaatacagtctaactttccttactattctatcgaattttagataaaattgcaagccttttacctatattttcttaattattcctcttcttttcttttgttttgtcgtcttgctgaaagatcctgatctagctttgaaaattctcatttaaaatcttttattcaagctcattacgtaccttttgctcctttgggttcagggaataaaaaaaaatcggaacagacgttccgatttttttaacctgaatttcgtaatcctgtagccactccattgatcgtaatatggattagcttgtcttgatcggctggtaattggccggtccgttgacgtcgaatcaattctaactgaatatagttcaggacgttaaagtacggcatccgataatccaaactttctttcagataagggttctcagcgagcaactcgtcttgttcctcaatcatcaagatgatgtccttggtcaattgccattcatgtaagatgatctgatagatattgcggacttcttcttcctcacacaattgggcgtactcaaaagcaatgtccatgttggctttggataagaccatgtccacatttgacaagagagattgaaagaaaggccagtttttatacatgtatcgaagggtttcgatattctcaggatcctcatcgataaattccttaaagctagaacctactccgtaccaaccagggaacatcacccgactttgtgaccatgagaagacccatgggatagcacgtaaaccaccaatttctgtaatggtcttacgagcagctggacgtgaaccaatattaaagcttgaaattgctttgatcggacttgattcaaagaaatagtcatagaagtgctcattcccaaagaccaaatcacgatagatatcgtaactacggttcacgactttatccatgacttccccgaaacgatcaaacatagagaatggactcttttgttcggcaatcattcggttaatggttgcagagacgagcatctcaaggttgtagtaggcagcatctttatttccatatttattgccgattacttccccttgctcggttaagcggatacggtcattaatggatttcaatggttgagaagtgatggcttcataagtaggacctccaccacgaccaacagtaccgccacgaccatggaagaaggtaatcttcactccaaactcgtctccgatagcggtcaattgttgttgggctttaaagagggtccaacaagaagacaagtatccaccatctttgttggaatcagagtaacctaacataatctcttggtagttgttcttagaagcaatccaacgtttagcgattggaagtgacaagtaacttctcatggtttcttctgagtgatccaagtcttcgatcgtttcaaacaacggtacgatttgaacgcgagctttttccgtatcaactaagcccacttctttcaacatcacagccaattccaacatatctgacacacttgttgcatgagaaatgatgttttgacgaatgacttcttctcctaaacgatccttcaattcacgggccgttcggaaaatcgctaattctttttcaagcagttcagatttttcagcatgggttgctgataaaatacgtgggtcttctaaaagttctttcaagagaacttgacacttttcatcctctgataaatcagaataatggtcattaattccagctgatttcagcaattctgccacacaggcttcatgtacacttgaatcctgacgcatatcaatagaggcgagatagaatccaaaaacatcgatggcttctagaagttctgcaaactcaccagaaattaaatactctgatttgttttctaacaaggaatctttgatcttttcaaggtcttctttaaattcttgagctgatgcataagctggagactctttctcagaaattttctttagagcgccagaaatacgattgccgatataatcagaaactggcccttgttgatgagcatttgctcctaataatctctcaacagcatatcgatcttctctggtttctcccaccatcgtccattcttttaaattgaccaaggtttggatcaattttgactggatatagtggaaagctcgacggtaaggttctttttcacgaaagacggatgtatcacttgatagggctgccatttcagctactgcttcacttgttttagaaagactcgttgaaagggagaaatgacggtataatttagaaatcttttcgatgtaatagttcaaaatgacttcgctttgaatagttgctgaacgcttcaaggtctcagctgttacaaacggattcccgtcccggtctcccccaatccacatgcccattgtgatcggacgtggttgttcaagctctaatccatgctcttttgccaagcgtttgtattccaacataagatttggaacagcttgtaagaaagagctattgtaatattccatgacgttggtgatctcattggtaaccttcaattttttgtcacgaatcatatccgtttgcatcatgatttcgatattacaacgaaggttgttataccacttattctcattcattaaaccagctttaacatcccggtgctgacgaagaagagcgtgaatatgattggttagatccagcatggtttttcgttgcacttgagttggatgggctgttaaaacaggtacaatattgagattttcaagaatttcttgtgcatcttcattttttgcaacttctttaatggttgaagaaagttttccgaggtattcaccatccacgttattcaaatgattgatttcataggccaaatcgacatcttctgagatgttaatcaagagtggtaaaatggcaaaataacgtgaaatcactgtcatttcttcatttgtcaattgttccactatttgattcaactcacgatagttctgtgtttttgatagatccttcaactgcttaattttatcaaaggtttccggacgaaccaaatttttcgtaatatcatctaataaattggttaagatttcggcttcttctttgataatatctttatttgtgaagttctctaatttttgtaagaccattttttctcctttttgaatagccattcaacaattcccttttaataataaggtttgattttacctttttcttcaaaaaccatgccttcttgttccatcttggctcgtttttcactagcgtcgatattcaaaacgaaagcaatcgctacggataagacccataaactatttcccccttgggataagaaggggaaggtcactcctgtagacggaatcaaaccagaaattcctccgatgttaatgaaggtttgcactaagatcatcccaccgatcccaatggccatcatcgaattaaaaggattctttgctcgaataccgactaaaatgatccgaagaattaagaagaataggagggcaagaatcaagctagctccaacaaaacctaattcttcaatcacaatagcaaacacaaagtctgtgtgcgcttccggtaagtaaccttgtttttcaatggaatttcctagtcccaagccaaaccaaccaccattactcatggcatagtaagaattagctaattggtgacctgcgccagacaagtcattaaaggggttaaagaaggcactaaaacgtttggccacataaccaaagacaggaattttagcgacacgatccacaccgatgatccatattgaaccaaggataatggtggatgctccaacaactaaaccaagtaaagaggtaaaccaacgatagcccactccactagccgtaatcatgatcaagaccgttaaggccaagatcgtcgcatttcccaagtccggcataatcacaacgattccaatcagaatcaaggtcagccaacgccaatcgtttaaattccttggaatccattcattatgggtcaaggcttgataatcataatcacggatttcatcttgtcgtttcgaaaagatcaaggctagataccagactaagatcaccttgaggtattctgccggctggatactaaaccctccaggaatggtcaaccaaccgtgagctccattgacggtatctgtgataaacctagacagaatcaacaaaatcacttcaataaaaatgacaacagccagtacttttttatttcgaaggaaatctaagctaaatttataaatcaaggcgatggttaggagacttaggatgaaaaagagcccctgtgtccggaccatccgaatcgaactcactccactttgaattgccaaggcacttgttgtcgaatagacaacaatcaagccaatgatggataaaatcaaatagggaatgaggatggaataatttaaaagatgtcttttttcaattttcataattcaccatattcctaatgttcaaccttcattatatcatttttaagaagcaaaaccaaggaaaggccagaaaagattcggcttcttcccaattttcaagaaatattctaatcattcttcttattttcatatatttttatcctttttcgatgaaaagattccttttttttgaaaataatgactgaaatcagcatcttttaagcattaagttttgccttttcgttttttttacggtaaaatgtttctgtatgagaaaaaggataaaacccgttgttctcttggtcttttttatcggtatcatttcttttctcgttctttcacgaacgattgccgatctacaagccagagagcgacaagaaacaaccaaaaccattccgaactccaatacacctcgaaaaacaactactgcaagctcttcttctaaaaaagaagaagacatcaatccagaactggttggccgcccgatcattgatatctcaggctggcaattgcctagtgaaattgattacgatgtcctctcccaaaatgtgggaggtgtgatcgttcgtgtccatagtggggctcaagctaaaaaggaaaatgcagcaacctacttaaatggtctggataaatcttttaaaacccatatccaagaattccaaaaacgaaatatccctgtcgcagtctatgcttatgtcgctgctaaggataaaaaagaaatggaaaaagaagcagaggaattttacaaggctgcttctccttacaaaccgacctactattggttagacgttgaggaaaaaaccatgaaggatatgaacgcaggtgttgaagctttccgagcaaaactacaagctttgggtgcaaaaaatattggactctatatcggaacttacttcatggaagaacacagtatctccactgataaatttacggctctttggattcctacttatggatttgatgatggctactataatgctgcaccagataccaacacggaatacgacttgcatcaatatacctctcaagggcaattaaatggattctcacactacttggatctcaaccaaattgctccgacgcaagaccaagaagcgatttatcggaaacttttcaaggtacaaaaagataactcttcctcatagccttaaaacagcagatcaagtgatcttcactttttctgctgttttctatttttcaggagaaggcaatattgccgctattatatgttataatggtctaatgaaatctgattttgtggagaaaaagagaaaaggagaaagccatggcaaaaaaaaataaagtaaaaaaaaccttggtcgagcagatcttgacaaaagcaaaaattgagcacgtaggcctacaaatcaacgctttagaagggatcttaccagaagggattgatcgctctactattttcaaaaccctagctctcaaaggagataaaacgggtcctgtgattgggatcattcctattacggaacatctttcagagaaaaaattggccaaattatcgggaaataagaaagtcgctatgattcctcaaaaggatctcgaaaaaaccacaggttatattcatggtgccaataatccggtgggcattcgtcaaaagcatcctttcccaatctttatcgatgaatcagcccttcagttagagaccatgatcgtatctgccggggaaatcggccatagtattcaaatcaaaccacaacttctagcagacttcgtacaagcgacttttgcagatattttagaataatgacagagaaggagacaagattgtgaaactatattttattcgacacggacggacagaatggaatgaagaaggacgttttcagggatcaaatggcgattctccgctgttaccggcctctattcatcagcttgaaaaattaggaaagcacctagctagtgttccttttgatgcagcctttgcaagtgatctgccacgaacagtccataccgcaaagatcatcctcgatcaattggagacacctctagaattgcaagcaacgcctgctcttcgtgagtggaatttaggaaaactggaaggtgctaaaatttctaccatttcagctatctatccccaacaaatggatgcctttcgccataacctagcccgctttcaaaatgaaatctttgatgcagaatctgtctatgaaacgaccaaacgtacctgtgattttgtaaaaagcctgaaaggaaaagagctcgatactgttctcatcgttggacatggggctaatttgacagcttctattcgaaccttgcttggttatgacacaggagaactccgcaaaaatggcggactagataatgccagcgtgacgattctgacaacagatgattttgagcactatcacttagacacttggaacgacacctcttatatggaagactaaaaaacactgatcttgcgatcagtgttttcttttagcttatttcatagttgggaagagtaggacgtcgcgaattgttgttacattggtcaacaacataacgagacggtcaataccaattccaagtccacctgttggtggcataccatattcaagggcttcaacatagtcatagtcgatgcctgtagcttcgtcatctcccaattctttggcacgcgcttgcgcttcaaaccgttgcaattgatcgattggatcattcaattccgtgaaggcattggcatactctttggtcatgataaagagttcgaaacggtcagtgaagcgtggatcttctggatttttcttagccaatggagatactgctactgggtgaccgtaaacaaaagttggttgtgtcaaggtttcttcaacgaattcttcgaagaaggcattgataatttgtcccacttctgtgtagtgtttttcaactggtacatgtttttcgtttgcaagtgctacagcttcttcaaaggtcatgtcttgccagaagtcaacacctgtgatttctttaatcgcatcaaccatgtgaacccgtttgaatggttcattgattttgatttctgttccttgatagtcaattggaccatcaccatggaccgctttcgcagcatgttggataatgccttctgttaagtccatgatatcgtggaagtcagcgtaagcttgatacacttcgatcgaagtgaattcagggttgtgagtggcatccataccttcgttacggaagatccgtccgatttcgtaaacgcgttccatcccaccaacaatcaaacgtttcaagtgaagctcagtcgcgatacgaagcaccatgtcaatgttttgtgcattgtggtgagtgataaatggtttagcagccgcaccaccagcttcattgtgaagcactggtgtttccacttcaaggaagccttgaccatctaaataacgacggatttcagagatgatttttgaacgggttacaaagcgttcgaagctttcacggtttgaaatcaaatccaaataacgtttacgatagatggtttcaacgtctgaaagtccgtggaatttttcaggcaaaggacgaagggcttttgacaagtgagtgatatgagttgctttaatcgaaagttcacccatatctgtgcgcatgatttccccttcaacaccaaggaaatcaccaaggtctgcttttttgaagatctcgtagttttcttctccaacagcatccttacgaacgtagatttgaatttgaccttcacggtcttgaagatgggcaaagccaacctttccttttccacgttttgttacaagacgaccggcaataatagctgtttcgttcaagtcgtggagttgttctttatctaattctgaatatttttcttttaattgacctgaatttgcagtacgttcgaatcgcttcccaaatggatcgattccttgttcacgaagggccgccattttctcacgacggacaatctgctggtcatttaattcttccatatgttcagtagtcatttggaacctcctaagttattcttccctattctatcatatttagaccagaaattcactaatatttaccaattaaacaaaaataagatggaagaaaaaatgcagcttattgaatgaatactcaaaaacatctgaagaccgtcgttgactacctaaatagcttgacttgtataatacgagatgattgaaaaatttcgacaagctattccacaacggcagcaaaaaggagcgtggagaatcttgaaccattcatcctgacacgctcctatttttttattcataacgaagggcttcgatcgggtttaacttagaagccttattcgctggtaaaattccaaagatgatgcctacaaaagcagagaaaataatactgccgatggcgacatttaaggagataatcggtggtccttctagggaggctgctgcgagtgtagtaatcaagctattcacaccataagcaaggccaagtccaattagtccaccaatgatggttaagaccatcgactcaatcaaaaattgaaccagaatcttacctcgggttgctcccaatgctttgcgaagaccgatctctctcgtccgctctgtcacagaaaccaacatgatattcattactccaatcccgccaaccaaaagggaaatccctgcaatggcaccgatcactgacgtcataattcctactactttattggtttcctctaggatgctatccaaattaaagatttgaaattctccctggcgaacacctgaaagctctgttagcttttgagcagcttcgatcccaacagatttgatttctttcacatttggaacgtgaacgacaatattttgaatttcatccgttccgaattcagaggcgagttgggtattggccatcaaggcactgccacctgaagaagctccatagagggctgtccctgcatttggatccttgaaaattccaacgacgcgataattattgtccccaacagagaccacctgattcagtggattctccgttccaaataattgttgagccaatccttcatcaaggagcactacccgtgagaaattactatagtctgaaggagttaattttcgtccagataagagctcaacctttttgacagaaaaataggtttcatttaccccttggatgttcacaccgtctgcttttttcttttgaaaagcaatggttgcattggaggtattgctaacatagtaaccatcgatgccttgaatcttggttaattccttgacccaagattcttgcacaactggtggtgcttcttggatttgaccatcaacatcttcagcattttccccatcaatatccgatggagcagccatccctcggtcttcagctgcagggccactttcacctccgccttctcctgtatcttcagaagggccaatattgattcctgtcacatagccactcttgttcggagaataagagatttgtacatactcttggtccttggtaaaagtcttggtgacaccagctttcattccatctccaagagccatgatgacaaccacagaagcaaccccaataatgatccccaccatggtcaagaaagaccgtaatttatggctcataatcgagctgatcgcaaatttccaattttgcattaggtccccctttccagcttgctatctgaggagatcactccatcacgaatgacgatgcgacgatgcgcaaaggctgcaatttctggctcgtgtgtaaccatgataatggtttttccttcttggtttagcttggttaacaagtccattatttgctcccccgtcttggtatctagggcaccagtcggctcatctgctaagacgatggctggctgattgacaagggcacgggcaatcgcaacccgctgtttttgacctcctgagagttctgaaggcaaatggtgcatgcgagaatggagctctaccttttcaaggtactgctcagctaattccttccgtttagcaggatgaactcctgcataaatgagaggcagttccacattttgaaaggcattgagcttagagagaagaaagaattgttgaaagacaaaaccgatctgttcattacgaacacgtgctaattttttctcactgagatttccaacctcctgaccttctaggaaatactctccactggtcgggcggtccaacaagccaatgacgttcatcaaggtcgatttccctgagcccgatggacccataatggccacaaattctccctcttcgacttctaaatcgatgtcttttaagacacgaagttcctggtccccatttttataggttttattgattccttttagttcaatcaattttgtcatattttccgatctcttttccatcttccagtttctcattaggatttacaataacttgagcatctttctttaaacctgacaaaatttcctggttttcagcatcggcgttaccaagagttacttttactttcttagccttgccattttcgaccgtccatacataactcgtatccccatcagccatgacacttgtcacgggaacaaggggatgttgagtagaacttttgacttcaatattgacagaaaagccctgtttgagttccccaatctcactggtaatttctactgtgaatgggtacttggctcctccgcttccttgtgttccacctgctgcattggcacctgcttgacccgcgtcggtcggatagttggctacataagaaatctttcctgtccaggttttatccggatataccttggaagtgaggaccacttcctgaccttcagagatattggccaaattgtattcagacaattcccctttgacttgtaaatttccgttgctcacaatgtgaaccaaagtttggttggtccctgtagtcgattttgaaacatctttattgacttcgaccacggtaccatctgtattactcctaactgttgtcgcatccagaagagccttagccttgttcatattatcgaccgcatctgacttagcatctcgtaaatcgctagcttgagaatcgactgttcgttgggtctgcgaagctgatttggcatctgcttcttcatctcctgtcgtatcaatggtcacaccatttgtcagtaaatcatttaactgacgatctgccttattgacagcacgaacggctgcatcataagcggtttgggcctctgtactgctatactgaacaatcggctgaccggctgttacttgatctcctacattgaccaaaattgactgcaaatcccctttggttccatcaaaatagacatactgttcctggttggcagtgactttcccagttaacaagaccgaagaagcgatcgatccatccttgaccgtttgcaccattggagtttctttcgtgactgcttgatcaagtgtacttgggtgcgaaaacatcatcacacttcctgttccaatcaccacaattgctgcacctgcagctgtaaatagttgccattttttcaatttcttcatcgtttttctccatcaaagaaagcgttttattctataccatagtataccatatttccttacttttctatctaaaattgacacggcaacatgaaatttaaatgcttggtaacatgctaaacccttgacttttgtaacagttgatattacaatcaaactgaagtcccatttaggaggaaaacatgaaagaatttgatattatttcaatcggtggaggtagtggaggaatcgctacgatgaaccgggctggagagtacggagcgcgcgctgctgtcattgaagaaaaacaattgggtggcacctgtgtcaacagaggatgtgtgcctaaaaagattatgtggtatggtgcacaaattgcagaagcaattcgcgattatggaccagactatggatttacttctgaacagacaaaatttgattttgcaaccttaagaaaaaatcgcgaagcctatattgaccgttcccgtaattcctatgatggcagtttcaaacgcaatggggttgaacgaattgaaggacgtgcccgttttgtggatgctcatacggttgaggtaaatggagaaaccattaaggccaagcatatcgtaattgcgaccggtgcccatccctttattccttctgttcctggagctgaatttggcgaaacttctgatgatgtctttgcttggaaagaacttcctacatctgttgccattattggagctggctacatcgcagtggaactagccggtgtgctccatgcccttggtgttcagaccgatctcttcgttcgcggtaatcgtccattaagaaagtttgattcctacattgtcgatggcttaatggaagaaatggaaaaacaaaaccttccgcttcacaaacacaaggttcccatgaagcttgaaaaattagaagatggtcgtgtgaagatttattttgaagatatgaccagccacgtggcagatcatgttatctgggcaacaggacgaaaaccaaatgtccaggatctcaatctagaagctgcaggcgtcaccttaaatgaaaaaggattcattgcagtggatgaataccagaatacagttattccaggaatctatgctcttggggatgtcacaggagaaaaagaattaacccctgtcgctattaaagctggacgcactctttctgaacgactattcaatggaaaagtcaatgccaaaatggattatacaaatatcccgactgttgtcttttctcaccccgctatcggaaccgttggcctaacggaggaagaagcccagcaaacttatggaaaagagcatatcaaagtctatacttctcaatttgcttccatgtacactgctgttacccaacaccgccagcaagcaaaattcaaactcatcactgctggtcccgaagaaagggtcgttggccttcatggtcttggctacggagtcgatgaaatgatccaaggatttgcagttgctatcaagatgggagcgacaaaagccgatttcgatgcaactgtcgccattcacccaacaggatccgaagaattcgtgacaatgagataaaacataagcttgaagttgttacacttcaagcttatttctttgtttatggtaagatggcaatggcacggacaggtgaaccagttgccttgtcccagtgagggaaagcaatcgaaatcaaagcacctacagctggaacttggtccaattggttcaagacttcaacttggtagatattttgttccaagaggtagtattcattgaccaaaccatgctctgctgctggaatacctgcatcggtatcaaaggtttcatgacccacagccttgacatggcgttcatgaatcaagaattccaaggcttcacggctccatcctggactttgttgaacaccattttcatctaggttacgcatagcatcttgatctggccaacgttttgaccaatcactacggaaggcaacaaaagcaccctcaacaatttgtccatgctctgcctcaaagtctaagatatcttgtttgctcaagataaagtttggattggctgcaacttctttagacttgtcgataacataaagtggcaagagaagatctttgaggtcaatctcatccaaccaacgacccccttctacaaagtgaatcggtgcatcaatatgcgttccgtattgaccaaccactgtaaatttttgaacatggaaaccatcttttaatgtgaaaagatcttcttgttgcaaggcaggaagggctgggaagtgtggactttccgcattgatttggtgactcaagtccacccattttttagcttgcaattctttataaatacttagtaaatctgacatgtttcttcctccttattcgccccaaacttcagcgacaatttctttaatcaaaccgatttttttccattggtcttcttctgtcaaaatgtttccttcttctgtcgaagcaaagccacactgagtagacaggtaaagattttccaacggtacatactgactcgcttctttaatacgagcaatcacttcgtccttgttctccaattgaccactcttagatgtcaagaggcctaacaccactcctttaccaggggttacttctgcaagtggttcaaaaccaccagctcgatcagtatcaaactctaggaagtaagcattgacggcttcttctccaaggagttctttggcaatcggcgcatagccacctgatgaagcccaagtagaatggaagttcccacgacaaacgtgcgtattgacggtcaaaccagctggaacattttggtagacatcgttgttaaaggtcaagaagagatcagcgagttctcggcgaacctcatcttttgacttgccttgagctgctccccaagccgtcaagaaatgatcatctaccaagacaccccacgtacagtcatctacttgaagggtccgaagtcctgcatcatacaaatcttgaatcacttgaagataggcttgcttgatgtcttcacgaacagccgcaaaatcaggatagatggtattcaattgctctacatgttctgcatcacggatcaattcaaaatagaattgcgcaggcgctggaatggtatatttaggttctacaccatctacatctgctacaagatcacgcaagaacttgtaatgctctacaaatggatgattggctcctgtaatttttccaacgacaagtgccgagtccgccttggtcgtttcatcatggaattgatagccttgttcagcttggacgtgatcaatgccaccaaatccccagaagaaatccaaatgccaataagcacggcggaattctccatccgttactgacttcagaccagcagcaatttctttttcaacgaggtcacgaatcgcctgatcttctacttttgttaagtcagcctgactgatttttccagctgcgaaatcttcacgagcttgaaccaaagctgctggacgaaggaatgaaccaacatggtctatgcgataaggtgcatgtgtatgtgtcaatatgaattcctctttcctataagttttacattaattcatcaatgcaaccattatagcagtctaacacctgataaacaaggggttgggataatctaatatctttgacatctatatagtcttagactataacaaaaagaagtccttgaaggacctcttttttattttaatttttaaatgcatcgagcataacttgaaactcttcgttcgtgagtgtaatgcctttccccatctttgtatggtcgggactccaggtccggatatcatacttagctggagcaccgttaaaacttacacggttcaattccttggtccaacccttgtcattttctgacaagaccagtagatgttcttcgatttggaatgaaaattctgccatttcacgactcctttcttgccttctcatctctattattcgtaaatcatttacaaaatcgttgaaattatctataatatattgtatcaagttatggagaatttagctatgaaaaaatttctcgagatcgttaaagaccgagcaaatgaatttttcaatggaaaagtcagtacccctgccccattagaagatgagagaattattgaaatcattcaacaagcattgcgaaaaaaacaaggggttcatgttattttttcaaacaagagttttacaggcgatattgtcaagtatgaccaagaacgccgacaactgatcgtgaaaaattttaaaaagagtatgtccacgattattcggatttctgagattcagaaaatcagtttggtccccaataatattcgcatcgctcaacaaaaaggagaggtttaaccctctcttttatattgaaaacaaacgtcatttttggcgtttgtttttattacttttaatctcatttctaaatttattagagtatcaaaaaaattctatcaaattttaactttaacttttgaacctagtaaaaagttaaagttccagtacatactactagtattgacgttgccttgattaaaaaggtcaccaaatctttcataattacattatctatttaaagaaaaatattagtaataaattatgtaaattcaatctaatctctaatcaccataagtatgctcccattttttcatttcttcaacgatacttcttagagcaatacctttttttgtcattttatattcaacctgtggaggcgatgtcggtaaaacttttcttgataaaataccttcttgctcaaaatcatgtaatcgttgagctaatattctaggattaataccttctacactacgcaaaagactactataatgtatattaccatcaataatttcagataagatctcaagagtaaatttaccttttagtaaattcaagacccttcttgctggacaaattgattttttcaaagattgcttcttgcaagtctccattcatttcctccttttttgatagttactatactttttttcccttcttgtttcagaaattattacatgataagctaattatatcatttgaaaggggaaattactatggatattacaactaagtttgaccgtatcaaagatattctcggttgcgctgatggaagatactttggcactggatatactcaagtaaaatattttcagaaagttaaatatattgcttttgattgataaatgaaaattggtttgatgaaataacggaggaagcttgatgaaaaaaacaaatacaaaagcgccagcttatctactttttattctttcactaggatacattatggcggtcctagatacaaccggagtggttcttgctgttccccatattgaaacagctatgagcgtctcattagagcaatccatttggattattaacgcctatacactagctttaggctctttactcctactttcaggaaatctaacaacaaaatatggtgctaaacgaattttattatttggaatgacaatttttacacttgcctcatttgggtgctctttttcaccaaatattgaaacattaatcatacttagattcgttcaaggtttcggtgcttctttgtttatgcctagttcattagcacttttattcatttcataccctgattctactaaaagagcacgtatgttaggaatttggacagcaattatttctgttgcaaccggtactggttcttttattggtggactaattattaactacttcggatggaggggtattttcttaatcaatattccattgggaattttgacagtaatttcaatattacttcttgtgaaaaacaatattgccaatccaaagactagaattgacattttcagtaatatatttcttgttgcaactatcggaagtctagttatttaccttgttgaagggaatcaatatggctatagtaacctaaatcttttattgtttcttctcctgtttatattatttactgttggtttagtagtccacgataaaaaaagtaaagcacctattgttccccaccaactattaaaaaatgctaagtttattgcctctaatctgttaggtttagtagttaacatttcattatatggtattgttttggtgctaggactttattttcaaacttatttaaacctctcctcaatggtttctggactcctcattctaccaggaatgattgtcttaattattggtaatttattttacgcacgtgttgtaaaacgattttccgtgggaagcctcgctactgtctcaattatttttgccattgtaggagcagcaggaatttttggaattggagtcctttttcatgaaattcaactatacatcctaatccctttattttctttaatgagccttggtatcggagtgttaactccagcaactactaccattcttatggaagctgctggtcaagaattatctggaattgctggtgcaactttaaacgctaacaaacaaattggtggactttttggtacaacaattatggggattctaactactaatttatcccataattggaatatggttatcgttgtcgcatttttggttaacgtgataatgtatattgctacttggttaattgctagtcgttacctttatggaaaagaataaaaccaaacagaatgcattcaattaaaagttgattatacagattgaagaaaaagtccattttgacaattttcttcaatcttttttcataattatataaagaaaaaactctaaaggagaagtttttctagtcctaatagagtttttctatattctgaagagagatttaaccctctctttttttgttatactcgaacagttttacttgccccatcttttgagtagagattgattaaaccttcctggcaagaacgaatcatatctcctggcttgacttcttgtggaacggtgatcgtaagaagttccatcggatttggtgcgcgatcaatcttcactccatccttatcatgcaagtcttggatctggcattcaaaatgacggaagcctggtccgtagaattccacttggtcgccttcattgatgacattccgttggcgaatcgtcgcagtcatggtagatggatcaaagtccaccacttctcctacaaatttgtattgcggaatcttacgacgtgccccaaacaattgttcattttcagtcggtgtttggtagtagaatccagttgctaattcacgttgagcgactttccacaattcattgatcaaatcatccttaatggcataaaaggcttctggactttccatataggcatcacaagctgccttgtaacagttggcaactgttgatacgtaatggacagatttcatccgaccttcgatcttcaagctatcaaccccattgtcaatcatgtctggaatattttcgatcatacacatgtccacggctgacatagaatattcttctgggacttgtcctttgatactcttgcgttcttggccaaatggcatatcatagagatcgtatttccaacgacaagattgagaacaaccaccacggttggcatcccggtcagacatgtggttagaaagggtacaacgtccggaataagaaatacacatggctccatgaacgaaggcttcgatctcaagatcggtacgcttacggatctctgccaactcttccatggatacctcacgggccaagacgacacgggtcaagccatattctttccagaaatggaaggtctccacgttggttgcagaagcttgcgtagacaagtgaatattgagtccaggtgcataagttgcacagatttcaatcaaggccgggtctgagacgatcacggcgtcaaggcccatatctcgtaattcacggaaccattcaccagccccttgttcatttccctcatgggtcaccatgttcgaagccacgtgtacatctacgccacgtgcatgcgcatattcgataccttcacgaagctcatccatggtaaagtttccagcacggctacgcaaaccataggcttgtccaccgacgaacactgcgtctgccccataattaacggcaacttttaatttttctaatgttccagcaggtaccaaaacctctggacgtttttttgtatttgtcatgttttctccaatttacaagattgtcgatatgatgaatagcctcttcgttccctgaaaaaggaaaactcacaaacgaagaagccctagtttttttattattttacacgatctggttcataatcatagaaaccagtatccaaaccacgattagctggatgcaatttgcggatttcttcatcaaacagataggcttgatcctgtgtaaatgttcctttttgaatcaaatcacgggccttgacaaagtactctgtaatcttgacaaagttttcacccggacagtagacaccatcgagtttccaatgatcaaagccatgttctaccaactcagacaatttggtcatcatattcaagtcattatttgagaagatatgggttccatgtttgtcctcgtagaccgaataatgagaattgggatctcctggctcggccaagaacagatcccgatctttggtcacagagtcctctgtcttgatgaagttgtaataattctgaagaagaggtcgtttcgaatggtgaataatgctagcaccatagaccaatacttctgctggaatctgaagattctcagccattacgaataattcggcagatggaatctcacgagccagaacagcttcagaagctcctgcttgttttccccagaaattgatctggcggctagaagtgaccatggttgatgcatcgtagatggttttgaatggatagccatctcgtttcaagacataaaaaacgcccgcatctccgacagtaatataatcagcctgaatttcctttagaaaatctaggaaaggcttgattgaatccatcatcgattggtgcatcagtgcatttacagctactgtcaattctttgccagcagcatggaccagttgggcaattcgatttatttcgtcatagcttaaagtttgaggcaatcgtaatccgtagtctttttcaccgacatagattcggtcaacccctgcatcaatcagggcttgcgcttgctcaacactctctgctgttgctgtaataataatatttttcatagaaccattataacaaaaattccgatattctagaaaaatatattcattttgtaaaatttgtaacatttttgtaacatttatatacctgaattcatgatagaataatagagtactgttaggagagagaaaatgcccgtaagaaatttaagacaccatgaagaagaattcgattatatcgaattaaccaaacaaacccaagaaacccctattcaggactatgctcctgaagttgaacccgcacctcaattaagtgaattgctatattttttaaatatcgctattttctgtgtgttgacggttgtatttagttttatctttttagcaacaaaaatgaataccttctttgcgtttgctttagcgattggttctagctttgctagtattcaagggttccgaatttactacaataaacgaaaaaaataaaaatcaggttcgcctgatttttttatttactcgaatttttttaattggaataacaattggaagacaaaacttaactgccaattgccatcttaccttccataaaaaatgaggctcagtgagcctcattttttatacttcttttgtttcttcttcagctgcttcttcagaatctttttcacccaactctaaaacgatgtcttctgattctgtttgtttgcgaatggattgaaccaagtcgttgccgcttagattttctttttgaagtttatccttaaatgagtgatagacttcttgagatttttcaaccacatcttgcgtcttttctttgacagattccaaaacagttcctgtcgtaatttctccagaaccaactttttctttggtttgttggatcacttctgctgcttgttttgaaacatccttagcagtttgtttcaccgattcatgtacttcttgaggatcttcttgatagtcttttacgaagcgcaccacttttttagtgactttctttccttgctctgttgataaatagtaggctgctgaagcacctgaaatcacaccaattaataaactagataaacgtcccatattcttcctcgattctatttaaataattttgaagccatcttaatcgcttttaatccgatagaggctttcactgtttttccaccagctgatacagctttgacactcaattgacgggcttgatcattcaaatctgaaacagactctgaaagatccgccacggctgtaaagagtgggtcaattgttgcaactttttgattcaaatcatccgttaaaacattgacttttgccaatagatcattggtctgatgcaaggtgacattgacatctgatgtcaaaacttggatcgttttttgcgtctcatctacaacttttccaatctttgagaggaaaaaaatcatataaatgacaagcgctactaaggcaagacctaagaggccgtatgcaatttcaataaacatatgttactcctttgtttctacataataaggggcttttttgcgtcgttggtaaaagatgatggcgagtccaactagaatcaggatcatcgacaaccactgggaaacacgtaagcccgcaaacatcaagctatccgtccgcattccttcgatgatcatccgaccaaaaccataccagataaggtaaaaggctgtgacctcaccttgtcgcaaaaattggggcttcctacgaagaatcaagatcaagagaaaacctaacagattccaactggattcatataagaaggttggctgacggtaactaccatctatatacatttggtctcgaataaaagagggcaagtagttaagacttttaacagcagctccataagcttcctggttaaagaagtttccccagcgaccaatactctgtgcaatcatgacgcttggggccgcaatatctaagaaatcaattggctcaatcaagcgtctacgagagaatagatagaggacaagggcacctgtcaagaggccaccataaatcgcgattcctccgttccagatagcaaaaatctcaccaagatgctggctatagtagccccattcaaaaataacgtaatagagtctagcccccacaatcgctagtggaaaagcgatcaaaatgaagtcaatgatagcatctggatcaattttcttacgaggtgcttctttcatggaaagataaacagctagaatcaagccagagacaatacaaattgcgtaccaacgaatactgatcggacctaattgaagggctactggattcattccttcacctcattttgactaatcaactgggacaaacgttcttcaaaggttttggtggcatcatagcccatttctttagcccgaacattcatagctgcggcttcgatcacgaccgaaatgttccgaccagtcttcacagggatgcgaatccgaggaatggtcacgccaccgatttccaactcttctgcattattaccaagacgatcatagacctgatccttagcataattttccaagtaaacagcgatttggacttgtgaagaatccttgacagcactggctccgtagagactcatgacatcgataatccctacaccacggatctctagtaagtggcgtaggatttcagctggctctccccaaagggtcatctcatctctcgcatagatatcgactcggtcatctgctacaaggcggtgaccccgcttgacaagttccagacctgtctcgctttttccgattccgctatctccttggatcaagacacccatcccataaatatccatcaagacaccgtgtacactcgtgcgttctgctagccgactatccaaatagctagaaagctctccagataaacgactcgttgcaacattgctcttcaaaatggctagttgcttctcttcagcagcacgcaacatttcttctggaatttctaaattccgcgcgacaatgatgacaggtgtctctggctggaacatcttgcgcaagacctgatgacggttgtgagagctcatcttcacaaggtaggaccattctttcattcctacaagctgaatccgctcaggtgtgtaatagtcgaaatagcccgtcatttcaagacctggacgtgaaatgtccgcagtcgtaatttccttgcttaagaggctatcatccccataaacaaccgatagacgaagcttttcctgtatatcgcgaacagtaactgccatatcattctcccttttcaaattctctctctattatagcagattttctcttcagacgagagcctgaagtgtcatttgaaagatccattttcaactcctttttatggcaagcaaaaagaggccaagacaaaggtctccaacctctaggaaatgatgggaacatatgaagaatgctctagccttggccttgcaagaaatctttgatcatagatttgattccgatagagaccgcatagaccaccgcattgaaggaaatgcgatcaagccgtgcataaaggcgaaaggacctccccccaacaaggagaaaaccagatacaaaaccggcagaaataaaatcgaaaaccgataaatttgtggctttctagccatttctgttggcagaaacaagaggtagaagagactattccaaatgcccagtggaaaaaggagcatcccgatcaaaactgttccaactccttccccaaaaaaacgatttaaaatgaaaaactgtcctataaaactgaagaagaggtatagaataaaagcaaggtaatagaacttctgcttcactcggatctccttttagaaaaatggactatcattctgatcatggatgggttcggcctcttttcttcgacgaggtcgagggccatcgtcaaacatttcctgctcctcctcgtccttataaggcaaggtcgtatctaacagtaaatagataatcacaccgataaaggcatgagaaaccgtaaaaagaataaacaagaagcgtaggagagttacactaagaccaaatttatcagctaagccagctagcacacctgaaaccaggcgatgtcgttttaatttgtaaaatgatgatgtcatttgattttcctctttctagttagacctattttagcagagtcgaactggaaagagatccgcctaaagactgattcttacacttgtctcatttcaagaaattgcaggcagctgtgacagcgaccgcaggcatatttcttcagatcgatttttcgctttcgtctatactcttggccacaatggggacattgatagagatagatccgcttgactcgcccagttctatctggtagaggaggtgtgaaacgaagaccgtccacttgctggagaagttgcttaaagtctagatctttgtggcgatagccttttccttgatcgtaaagatggtaatggcagagctcgtgacggacgattttacgaaagacctctaacccgaaagcttggtatattttcgggttgaaatcaaggtgtcgatctttgggaaagaaacgacccccagtagtttgaagacgtgaattccactctgcttgatggcggaattctctcccaaaatcttctagggatacttggcgtacatactcagtcagattcattcggagctaccaaactgagattgactttttcgcgttccacatcaatcttcttcacccagacggttaccaaatcacctactgatacgacctggcttggatgcttgataaactgcttgctcatatgggagatatgaatcaagccatcttcgtgaatgccaatatcgacaaaggccccaaagtcaaccacattgcgcacaaccccttctaatttttggcctatatggaggtctttaatatccaagacatcctgacggagcacgggtgcatcaaaggaatcccgcaaatcgcgacctggttttaggagatcggcaatgatatctttcagggtttctgggcccagatccagctgagtagacatctcctttatgttcacagcttttaatttttcctgagcggatgcatcgaggtcggtaatttcaagaagctgaaaaagtttttcaacttccttgtaactttcagggtgaacgccggtattatccaagatgtttttactttcagggatgcgtaagaatccagcagcctgttcgaaagccttggcgccaaggcgagggacttttttaatctgtgctcgtgaaagaatcattccttcttcttcccggtatttcacaatattttcagagatggttttattgagtcctgctacatgcgctaagagagagggactagccgtattgatattgaccccaacttggttgacgacagtatctaccacaaaatctaaactttctgtcagttttttctgattgacatcgtgctggtattgacccacaccgatagatttggcatcgattttcaccaattctgctagcggatcttgcaggcggcgggcaatggagatggccgagcgtttttcaacggttagctctgggaactcatgacgggccaattcactagctgaatagacagatgctccgctttcattgacaataacatagcgaactcctggatggtcgtggaggacctctgcgacaaaggcctcactttcacggctagctgttccatttccaattgcaataatctctacgccaaactccttgatcaaggaggacagatcctttttagcctgctcgatctgagctggttttgcaggagcaactggatagatgacctgggtagcgagcatctttcctgtctcatcgacaacggctagtttagcaccagtccgaaaggctgggtcaaatccaaggaccacgcgcccttttaatggaggaatgagcaatagattccgtagattctcagagaacaattgaatggccccgtcttctgccacctccgtcaactctgtccgaatccgacgttcaatcgcaggaacgatttttttcttaaccgcttgttgaataacctcatcgacataggcatttttcgttttaaaacgagcctcaaaaatacgaatgatccgatccagttggtgctcgaatccgactttgagaacgcccaatttttccccacgattgagagctagagtccggtagccttgcatattcttgatcttctcagaaaaatcataatagatttcaaaggttctcttagtatctaagctttcatccttcaaggttgacgtcaggagggaatgcccatgaatttcttgataggtgagggcccgtaattgggtatcctctgaaatagcctctaccagaatatccactgcaccagctaatgctgcggtttcagttgggaaggcctcgcaggtaaatttccgagcctctgcttccaagtctggactattttgcaaaatgagacgtgccaaggggaaaagtcctgcttctcgggcaatcgtcgccttggtccgccgtttttccttataagggagataaagctcttcgacatccgctaatttttcagcagcctcaatagcctgcttgagcgcctctgtcagtttgccttgttcctcaatcttagcaaggacggtttcctttcgttcagctagagccgttaaggatttgtcccggtcaataatggccttgatcgctacttcatctaaatttcccgtcatatcttttcgatagcgggcaatgaagggaatggttgagccttctgcggtcagactcaatacggtatcgatttgttttaagctaacacccaattcttgggctattttttcatatttatccatagcttctattatagcatattttgctaccatcaaaggggagatcccctgttctggtctctgtttcagggatttttcatagaataattttgacccccttgatctttccttttatgctccatttcccccttgctctttcctttttgttataatgaaagaaaataaaaaggaggcccaataatggctattaaattctcaaaaacagatgatcttgataaaatgtttgaaaactttgcaagttttccggatgtagaaaagaaagtcgaatttcctgaagaaaaaaagaaggcagaaactgctacagctaaagaagcaaagaaggttaagtaatgacattctttcaacaccttccctctagcgtcttgcaggctggggctatttttctctcgattattatcgaggccctaccttttgtcctaatcggaagtatcatttcagggattattgaggtctatatcacccccgaaagggtctatcgctttcttcccaagaataaatttgggcggatcttctttgggacctttatcggctttatctttccttcctgtgaatgtggaattgttcccattatcaatcgctttctagaaaagaaagtcccaagttatactgctgttccctttttggtgacagcaccggtcatcaatcccatcgttctctttgcgacctactcagcctttgggaattctgtcaagatggccctctaccgcgcccttggttcccttttggtcgcaacggtgctagggatctttcttggttttattcagacagattcgatccaaaaagaacatcgtaaggctgtacatgaacatgattttaggggcttgagcaaaggtcaaaagctctttcaagtcttggtgcaagcgattgatgaattctttgacacgggacgttacctggtatttggttgtctctttgccagcctcgtccaagtctatgtcccaacacggatcctcacttcgatcagtgcgacaccggttattgctattctccttctcatggtcttgtccttcctcctctcactttgtagcgaggcggacgcctttgttggatcctctcttctaacaagttttggagtagcgcctgttctagcctttttggtgattgggcctatgcttgatgtcaaaaatctcctcatgatgaaaaattatctcaagacccgttttatctggcaatttatcggaattgtgagtggagttgtgctcctttatgcttggtttgtgggggtagtgctatgattcgtttcttgatattagctggctattttgagctcaccatgtacctgcaattatctggtaagctcaatcaatacatcaacttacactattcttacttggcttatatttctatgttcttgtcctttgttttagctcttgtgcagctgatcatctgggtcaagcagatgaagatccacagtcatctttctggcttctgggcaaaagtggcaagtattttcttgctctgtattcctttgtttgtcgggctatttttccctacagtgacactggattcccaaacggtctctgccaaaggctaccacttcccggttgcggctggttcttccaaggaaatccagcaggacgaagggacaacaacccagtatctcaaaccagatactagtagctattttaccaagtcagcctatgaatcagaaatgaagcaggcggcaaagaaatatgttgataaaaaagtgatccaggtgaccactgagaattacatggaagtcatggaagtgatttatgattatcctgaccaatttgcaggaaagacgatcgagttgaccggcttcgtatacaatgaccccaataacaaggacagccaatttctctttcgctttgggatcatccactgtatcgcagattccggagtctacggtctcttaacgacgggtgctccgcagcatttcgaaaacaacacttggatccatgcgaaaggaaccttgtccattgaataccacaagcagctcaaacaaagcttgcctgttctccacattacggattgtcaaaccattacacaaccagataatccttatgtctaccgcgtcttttaatggagagactaagttccttcaagaggtcttaaacccgtataagctagaacgctccttcgttctagctttttctatgctgtctactcaaatcccagcggaaaatattcggaacaaggattctatcaaagaaatcttgctgattttatggtaaaatatggttaattaaatagaaaataggtacttaaatgtcttcaaaagttattgtaaccattttcggagctagcggggatttggccaagcgcaaactatacccgtccctttttaggctctacaaatcaggtaatctatctgaaaactttgcagtgatcgggacagcccgtagaccctggagcaaggaatactttgaatcagtcgtggtagaatccatcacagacctggccgatagccctcaacaagctcaagaattcgctagtcatttctactaccaaagccacgatgtcaatgataccgaacattacatcgccctgcgcgaattacaaaacagcttggatgaaaaataccaaacagaacacaacaaggtcttcttcttgtccatggctcctcaattttttggaaccattgccaaacacctcaaatcagaaggcattgtggatgggcaaggctttgagcgcttgatcgttgaaaaacctttcggtacagacctagaaacggctagtcagctcaacaaggaattggaagaaacctttgatgaagaacaaatcttccggatcgaccattaccttggaaaagaaatgatccaaaatatctttgctattcgttttggaaatcttatttttgataatctttggaaccgagattttattgacaatatccaaattacctttgctgaacgcttgggggttgaagaacgcggtggctactatgatcactcgggggcccttcgagatatggtgcaaaaccatacccttcagcttttgtctctgcttgccatggataaaccagccacctatactaaggatgcgattcgggcagaaaaagttaaagtttttgagcaattgcacaatccaacagatgatgagttaaagaaattctttatccgtggtcaataccattcaggtacgatcgaagggaaaaaagatatctcttatcgcagcgagcccaatgtcgaccctgagtctactacagagacctatgcttctggtgcattctttgttgatagcgatcgcttccgtggagttcctttcttcttccgtactggaaaacgcttgactcaaaaaggaaccatggtcaatgtggtcttcaagcaaaccgactccatctttggacatagtttgcaaccaaatgtcttgaccatttatatccaaccaaatgaaggtttctcattgagcatcaacgggaaagaggtcggagaaacattcagcatcgcaccgatttcctttgattacgaaacagatgcgactgcaactggagcttccccagagccttatgaaaaattaatttttgacgttttgaacaatgactcaaccaattacagccactggcacgaagttcgtgcttcatggcaattgattgaccggattgaaaaactatgggccgaaaatggtgcaccgctctatgaatacaagtctggatccatgggaccaactgcatccgatgatctccttgcagaatacggagcagaatgggtttggaaacctgaacctaagaattaaggaaagccaccttcgggtggtttttttgatagcgcaaggaaacaaaaagacaaattgttcttccaacaatttgtctttttctattcgactcttaaatcaagccttccaagaggcctctcatgaagttttctgagtggaatggtccgatgtcatcaatcttttctccgaaaccaatcaacttcactggaatgtccaactcttcacggatcgcaaggacgaccccacctcgagccgttccatcgatcttggtcaatacaattcctgttacaggcgtaatttttgaaaactctttggcttgcaccaaggcattttgaccggttgatgcatcgagggccagcaaggtttcatgcggtgcatcaggtaccacacgcttgataatgcggccgattttttcaagctcggccatgaggttgtccttgttttgcagacgaccagctgtatcaatcatcagaacatcgatgttttcagcgatcgcgcgttccattccatcaaagacgacgctagcaggatctgatttttcaggacctgtcacaactggaacatctacgcggcgtccccattctgccagttgagctactgctcctgcacggaaagtatctgctgcaaccagcatgactttcttgccttcttgtttgtagcggtgggctaatttcccaatagatgtggttttaccaactccattgaccccaacaaagagcatgaccgtaagaccatcttgaaaacgaatggcttcattaaattggccatccttttcatacaagtccactaatttttcgatgatcacgcgcttgagagcatctggttttttggcattttccaaacgggcttcataacgcaactcttcggttaaattagaggccacttgaaccccaacgtcactcatgatcaagagttcttccaattcttcaaagaattcttcatcgactgaacggaaattggcaaagaaggcattgaggcgtgctccaaatccagtccgtgtctttttcaagctacgatcgtatttttcctgaatggtttcttgctctggctcaacctcatctggaattggctcctttgcctcttcaacagttctttcctcaacggttgatgcagcttctccttcaggaagtctagactcggcttctgccacttctgaagtttcctccacttgagcaatcgcttctgatacttcaggttctgaaacctcatcctgagcttctactagttctagagactcctcttctgtcgtgctcccttctactagctcagcttcagatgatggaaaggcaattggtgactcttctttcatttctgaagcattagccgcatctgcttccccaccattttcagtttcttccgcttcttcaagagactcagtctccgtttcatcagctagtggtgaaacttcttcaggactggcttctgtttgagcaggttcaaagacaactggagactcctctaccggttcttgaacttcaggagtctctgaagttcctatttcttcaacaagaggttcctctgccggctcttcttgagcaacggttgaaacaggttgatgagtggctgcaattcgcgctttgagctcttggtagtaagcctccatatcagcgattttttgctcttccttgtcattttgggtagccgtcggctcctctttgacagtttcttcaacctcagtactttccgtcacttcttccgaagacggaagcactttttcagtttcttctttttttccaaataaacgatcaaataatcccatttattcactctcctttagcacataattttcaattgcccatgcgacggcatcctggtcattggtcacaggggccacaagcgctgcaacttccttcactgctggaatcgcattgcccatggcaactcccagtccagcccactggatcatagacaggtcattggcttcatccccacaggccatgacttgatcagccttaaggcccaaaatagctgccagtgcctctaaacctgttgccttgtgaacatttttagggcaccattccaacaacatttcccgagatttaaaaatttcatagtcttgaaataagtccggcttgatctgcttgatcgctgcatctaaaaagtcttgatcaacggctgtcacacacttgttgtaggaaatcttggatggcaggtctttaaaatctgtctcaacaaagtttagatagggattgtaatgggaatagagggacttccgttccgaataaatctcataaaccgttccctcactgatcgcatccagcggaaggcctagacgggctgtttcatcatgaatggttgcgacatcttctggtgccaagacaactttcgagaggatttctccattatttcgctgcaccaaaccaccgttaaaggtaattgtatactcttctttgaggcctgctgttcccaattcttctaaaagaaaatccatggctttcaaggggcgaccagtggttagaaccaccttgacaccttgggcctgtgcagcagcgagagctgctctattgcgaggggagatctttttttcagaattgagaagggtcccatctaaatccagcgcaatcaaggaaatcttactcatacgatttcctccatgtagcgcaagacagaacccgtcgcatggtggccgatgactgtttcagcaatcgctaagatttcaggacgtgcattttctggcgctacaggatggcccacgacttgcatcatatggaggtcatttaggttatccccaaaagccatcacctgatccatcgagatccctagtttatccgctaaggcggtaatcgccactcctttatcgacataatcgaggacaatatcaatcgattcaaaacctgtcgtcattgctttgacgcctgggatattctcagtgacccattgctctccttcaagaacaagagctgcatcaaagttggtggtcaatttgaagatttcatcttgaatatccactaggcttttcactttttgaatgttttcattgtagtgctgactcaaggccagatagtcgggatctactgtttccaatacatagctcccttttttacccgtcaaaagcagtttatcaggatctgcataaggggaggatttcaaggcttcaaaaacacccaaataaaagtctttggacatggtcgcttcgtagaggtcttctccatgaaattcaaccacgctgccattttcagcaatgaaaatcatctggtcttcaaacccttcaaagagggatttgagcgaaaggagggcacggccactcgcagcagcaaaataaatgcctttttctttgcagcttgctagcaccttgcgtaaaaggtcttgatcgtactgatgttggtcatttaaaaaagtcccatccatatccgtagcgatcaatttaatatcattattcttcattttctaagtctttcaattttactgagacgattttagaaaccccagattcctgcatggtcactccatagatggaatctgcagctgacatggttccttttcggtgcgtcacgacaataaattggctttccttatcaaagcggttgagataatcaccaaagcgcttgacattggcctcatccagagcagcctctacctcatccagaatgacaaatggaatggtcttgacacgaatgatcgagaacaagagggccaaagctgataaggctttttctccaccactcatgaggtttaaggattggatctttttaccaggtggctgcacagaaatctcaaccccagctgtcagaagatctggctctgtcagaatcaaatcagcagaaccccctccaaacatttgacggaaagtaactttaaaagattcacgaatggcttcaaaggttgatttaaagcgttccttgacttcgtcattcatgtcgttgatggtcgacagaagcatgtttttcgcggctaagacatcctcccgctggctagaaaggaaatcaaagcgtcccttcacttcatcgtattggtcgatcgcatccacattgactggaccaagtgccttaatgtctttttcgatactcttgagctggttctcagctgccgcaagattttcaaccggtttagccttttctttggcttggtcaaagctttgcatgaattcatcagtaatttgcgttaagagcttgttcaagcggtctgcatgcttttcacgtgtcgcttcagccttggcttgttgacgaatccactcttcatttttcttgcgcgcttgttccatctgttctgccacatcttcggcctggccttccaaatcatccagctcaaagcgtttccgaataaccccttgttccaagtccgttttcttggcttgagcctgcgtcaattggttggctagctgctccacatcgactgtctgaacttgagcctcgccttgttcaatcagcaattgcaactgatgctcctctacttccaaccgggagattgtttcttccaaacgccgagcatctgtttgctcgtagctttgttggcttttatattccgtctgttggagtcgcagttctgccaattgctcttgcaggttttgtactttttgttgcaggacatctttatccgacttcatggtttcaatgtcgcgattcaagttttctttttgaagctcaatggctgccaattgctcagtaagggactcctgctcttcttgaagagactgggtcgcatctgttgccaattctgacttcaaagcctctaagagttcctgaatttctttcagttgctcttggctttgttggtaggccaattgggcccgctgttgctccagacgcgcttgctcaccctggctttgaatagaggccaagtattcttgcgcttgcttaagcagattgtccttggtctcggcctcctgctctgcttctcttaaacgagcatccagagcttgcatttcctgtttcaaactatctaattctggtttgacaaagaccgtattttgagagcgattggcaccaccggcatacgatcctccggtccgcaattcggtcccatccaaggtcaccatccgaacttgatagttgactttacgagccgcctcacgcgcatgctccgtcgtgtcaaagatagccgttacgccaagcaggttttggaaaatctgttcaaaacgatgctcataggtcactaagtcactcgcaattcctagaaatcctgcactggcttgaatcaattctagattccgaggggatagttgacgagctttgatcgtcgtgagcggaaggaaagttgcccgtcccaagcgattgcgtttcaagaaatcgatcgctcgcgttgcagccttttcatcttcgacaatgatctgttggctgctagctcccagagcaatttcaagcgccgtctggtagtcttttgagaaactcaaattctcactaacagccccacagatgcctcctaaccgttctgcttcttgcaaaacgctcttgactcctgcatagaagttactatggttcttctgaatagcttccaagctattgatccgcgcccgcttattcttgctctcatccatcaagtcaaacatggccgcttgagcctcttggtaggcagctttggcctgctccacttttaccaattgctcttggtattctgctaataggcctttgaccgtcgcttgtgcctgctccaactcttccaattgtcggacttctttttccttggcagtttcaaagtttgtttgtgccttggtcaaatcctcttgacgatggcttgattcttgcaagagtgcttggatccggctctcaatggctgttcgctcattcgatttttcagcctctgtctgcaagagcgcgacatactgctctcgtagatgctcaatgacttgttccggatcttcttcgtagttggctaattctttttccaactcttcttgttgctgacggttctctgtcagtctttgttgaagcacagctagcgtctcttgtttttgagccagctcatttttcgcttcttccagacgggccaaaatagcatccagacgctcaagattttccctacgactatgggctgcttgactcgattgcaacttagctacttcgatttgcttttccaaatcactgatcaaacgagtgacctcaagtaagctggcctggtcctcagctaagctttcatccaactgatggcgggctttcttgatgcgtacattatcttcttctaagacctgacgacgttggtaataagaagccaactgttcttgaatggctttttcttcttgatcagccttttcgtagagctcttttgtcagatcgacttgagcaactaaaacatctagcaagagaacctgccgttcttggtctaattccaagaaacgacgagcgacagtcgcttgcttttcaagaggttggatttgtccttctaattcatagaggatatcctccagacggtccaaattctcctgggtttggttgagtttggtctcggtttccttgcgccgcgtcttaaatttcaagacacctgcagcttcttcaaagattgcccggcgttcttccggtttggagttaaagatctcctctacccgaccttgggagataatggagaaggaatcacgtcccaatcccgtatccatgaacaaatcatgaacatctctgagacgtactttcttgccatcgatcttgtactcgctgtctcctgaacgataaatatgccgttcgacacgaatttctttccctgcctgttggataaaaccatcttggttatctaagacaactgtgacacaggcataattcagcggttttcgcgattctgtccctgcaaaaatgacatcgggcatcttgcccccacgtagactcttgacactggattcccccagggcccagcgcaagctctccgtgatatttgattttccagatccattaggccctacaacggcagtgacccctttgtcaaatacgacttttgtcttatccgcaaaggatttaaagccttggatttcaatctcttttagatacatggggaatcattcctcgtttcaactgcattgcgggctgcttcctgctccgctaatttcttggaacgaccatgaccatgtcccatcgtttgaccgttcacgaacacttctacttcaaactctttggcatgagctggaccggactcgctgaccacttggtattggatctccacatctccgtgaacctgcaacagttcttgcagacgggtcttgtagtcaatgacttgagaaaattgacccgtttcaaccttgggaatcatgacctgataaatgaagcgtttgaccgcttccactccttgatccagtaaaagagcacctaaaaaggcttcaaataaatcgccaagaatcgtatcgcggtcccggccaccagatttttcttcgcccttgcccagtttgatgaaatggtcaaattggcaatctcgagaaaagccagccagactttcttcacggacaatcatagaacggaatttggataaatctccctccggtctgttggggtgttccttatacaaatattcggaaataactaattgaagaacagcgtctcctaaaaattccaaacgttcgttatgtgaaatttttaagaggcggtgctcattggcataagaggtgtgcgtaaaagctgtatctaataaactggtatctgaaaaaacgatctgaaaccgttccgataacagggcttgtaatttctccatgggaagcctactttctaataaattcatactcttaagtataccaaaaaagaagcacgaacgcacttcttttcctagttctagggcctgaattctccaattttaatcaggattttcttctgttggattttcaggcttattagggatcacttttaagagataataggtgataaaaatcgtcaaagcccctaaagcaagcttcacccaaataatcggtgccagatagatcgaaatccccatcagaatgtagatctgaagaaggatccatttcttccgttctttggcaatcgatttagtttctcggtaatcggctacataggcctgataaagcttggtttggtagagccaagtttcaaagcgtttggaacttttggcaaagcaagccatcgatagcagtaaaaagggagtcgtcggtaaaatcggtaaaggaatcccaataattcctaatcccaaagacacaaaaccaatcgtaagataaacaaggcgcatttacttctcctttgtatgatttttttgttaaaagccatttcatagttgacttactaacttttactaatcctttctcattttttagaaaaagctactaacacaacagcatagactagaaggagcaagatcccataaaggattccagcccatttataatagcgattcacaccgcaataacgctccacgtaagctctacttggtttttcaggatcataccaaaccgtcatcgaagaacatagtggaaattgggtctgaagagctgtattaaaagaaacaaatgaatttcgataaaaggtaatcgaattggctagcatctcttctcttgtgagaaagtaggatgcctgtttaggtccccatggggttgaaaccgtcctaatgaagaaataacgaaaggattttttataagcaacgccatttaccttgtattccacaatcggaggatttccccctcgaaagctattatagcccacaactgttccttttatggatgatgtagcaagccgaaccatctttttatcacggaaataaagataaaaataagtaccactcacaaaaactaaggctaaaaatataactgctgttgagaaccaaaacagtagcattttagttgacatttatttctcctccaaattttcttgataatactctaaaaactcttcttcactttgaacgatatgttcttttccatctttcgaactagttgcaggaatagttaggttcttaaagatattggtatcttttggaacaactaatttcaaaaaagagatttttaagcgaacatcttcttttccaaggaaatacaattcagatagcgaacctttactcaatatatcatatacttttggatacttgcttgctaaagaatctgcttgaacttttttagtaaaccaaaacgctgaccatacaaaattaaaatgtttgtttgaaagtttatcgttttgatcgagtatatcctcaaaaccttctttattttgccatgctttttgatttacatcataaaagtccttacctgtttttccagatgatgttttagaaataattttccccgtttctatatctatgataccaataaaagtttttgagtttggtttactattcactgccatctttataggcaaataagtttttccttcttcagattgtaacaattttggggaatccgcaacattaattggaacataatttctattatattccctcaccatcttaaacacatcataagttttttgtttaatcgtattgtcttttgtatcgtaaacatctaataaccagtattctcctttttcagggatattactctttaaataaggaactttatcattttcacttaaccagtacttatatgctgccgacttcaatttgtaactctgccgaataataaaacgttcaccatgcatctcaattctattgtttctgatgtcaatacgaggatcatatttcttagcctctttcgcttcctttaattcagcttcgttatcccagctaattgctaccgctttatgattagcaataaattcataatccatcatttttgctctcgggctccacatgacaaactgggttagttcatgcttatgataagccttatatgcaaggctggctcctgtgatagcaattacaagaaataaaacttggactaattttgatctgattatctttttcatttctatttctccttttctgtgcttgagcatgatctaactaccattcagattgatttcatactattctttacatgtcaattaatcaaaggattttataaatcattgaccacccaaaatttcttgacccatattatctaccattaaatcgcttagcaaagatgcaatgctctcattctattgcagtacaacatatttcgatgtaattattgtccagttgatcctgtttgacacttcaatagtttaataatctttttggtcttaatttcctgatgaaaatgcatcacacaagcaaaagcaagaaggtagatcatcagacataaaaaatcagtttctctaatataagtaaccaagaaaaaaatccctaaaaaagcaaaaagaatcttcataataaaaattgcaagcacctttgctctaagtgttttgcgctctttttccttcaaaacaactgttttccaacccgttctctgatctttttttctcgacttcgctatcatcaacattccgaaaactatcagagttccaatcattgcaatactgatattaatcgtatatgataaggtcccaaaggctgaattcaaaacacttgcaattccttttaaaagaaagactgtaagtggagcagcaaccattatccaattggaagtatttttttgatcattatattgaaatacttcgttttcttcatcaaaataaatccatttcgaatccaaataaccgatatatgttttcacaattaacatttctccgtcaatttattcttgagataaagtactcctatcatacacgaattttggctaaagagcaaattcattactagatgtagatttcctcaaataggcatataaaaaaccacccgcaggtggttttccatcttatatcttcgtcaaaggggtcgcggtatctggcgaggtatctagtacctcaaaatcatgaccgacagctagatctgctctggccagttggttctccatggtcatatgggccaattctttgatattgttctcttttgacaaatgccccagataaatcttcttggtgcgatttcccaaggtccggatcatggcatctgcaccatcttcattagaaaggtggcccagatcagacaagatccgttgcttcaaacgccaagcatacgaacctgctcgaagaatctccacatcatgattggactcaatcagatagccatctgcatccgcgacgattccagcaaggcgatcgctcacatagcctgtatccgtcagcaagacaaagctcttcccatccttcatcaagcgataaaattgaggggctgcagcatcgtgactgaccccaaaactttcgatatcgatatcgccaaatgtcttggtcttccccatttcaaagatgtgcttttgagcatcatcaaccttgcctagatacttggtgccttccatagccttccaagttgcttcattagcatatagatccatgccatatttccgcgctaaaacacccacaccatggatatggtctgagtgttcgtgcgtaatcaaaatggcatctaagtcttctggtttgcgatcaatttcagccaatagtcccgtaatctttttccctgataaccctgcatcaataagcagttttttctttggcgtctcaaggtagaaagaattcccactagaacctgaagctaaaatactatacttaaatccctcttctgtcattgactccttattcttcctcttctgtatcccagtcgtctttaatagcatctttgtcgtacggcaagacaatggtaaaggtagatcccttgccatattcactcttggcccaaataaagcctttgtgttgcttaacgatctccttagcaatggctaagcccagaccagtcccaccttgggcccggctacgcgccttatccactcggtaaaagcgatcaaaaatgcgcggcaagtctttctttggaatccccaagccctcatctgagatggagataatcaactgggcatctgtcgttttcatccctaccttgatctttccaccatcaggtgagtacttgatggcattgttcaagatattgtctatcacctgggtcattttatccgtatcaatttcaacccaaattggggtgatcggatattcccggatcagttcatacttcttggtatcttcttgcgattgactcttgatcttatcaaagcggttcaaaataaaggtgataaaggccgtaaagttggtcaactcgatgtccaactgactggtttcattatcgattcgtgacaagcttaatagatctgtgaccatgcgcatcatgcggttggtttcattgagtgaaaccttgacaaaatctggtgctactggctctgacaaagcaccatcgtctagggcttccagataggatttcacactggtcaaaggagtccgtaattcatgactcacattggaaacaaagaggcgacgctcccgctcttccttgtcctgctctgtcgtatcgtgcaagacagctaccagaccagagataaaacctgactcgcgacgaatcaaggcaaagcgcacacgaagacttaagtattccccattttcatcctgggaatcgatggtcaattctggtacttctgtaatcaagctgcgcagatcatactcgtctccaatcgaaagcaaatccagaatactggtattgagcacctcatctggattaacattcaattgcttggctgccatttcattgaccatgatgatctgaccacgtctgttggtcgcaagcaccccgtctgtcatgtaagaaaggatactggtcaaacgcttggtttcttgttccaagttttcatgcgtcaggcgaataacctccgacagatcattaatgctattggtcatatctgtcagttctggacttccttgcatgtcgaccacttcggaatagtcccctgcaatcagatccttaattttggcgtttaattgtctgagcttgatattgtccctacggttttctagcaaaagcaaggctaccacaatgataaacccaaccgtaatcagaacaaagacaaagttcgacgacattacaaattgttttagttgatcaatcattgtttctcatataatatccgacaccacggcgggtcaagatatattctggacgtcccggtgtgtcctcgattttttcacgcaaacgacgaactgtcacgtccactgtccgaacatcaccaaagtaatcatagccccacaccgtctcaagaaggtgttcacgggtcatcacttgaccgacatgggtcgcaaggtgatagagcaattcaaattcgcgatgggtcaagtccaattctttgttgcctttttgaaccaagaaggcatctggaagaatgtgaagatcaccaatgacaatttccgtatcggcctcattttcaagctgaggatcagccgcaaactcagaacgacgcaacaaggctttcacacgcgcttgcaattcccgattcgagaagggtttggtcacatagtcatccgcaccgatttcaagcccgatgaccttatcaaattccgtatccttagcagataggacaatgatcggcacattgctagtcttacgaatcgtacgcgccacttccaaaccatcaatctctggcaacatcaaatcaagaataataatatccggattttcagccgcaaagacctctaaagcttcccgaccatcaaaggctgtcaatacctcatagccttcttttgccatgttaaatttgataatatctgaaattggtttttcatcatcaactactaatatttttttcatcttacatacctgtttctaatgctacttttccttatcaatctctatcttcttattatatcaaacttatgaagaaatgtggagtctcaattgctggactttccaataagacaaagcaaaaagactgagatcattacatctcaatctttttattttttcattatttctcaacacgtgatttgttggagatatcagctaggattgctgctacaaactcatcatctttaaacattaaaacggtatctactttcagaggagataccgttctccttctttgaataaggaatctaaaatttctgactttctctatctgttcaattgatagatttcttcagagaaagaatgtaaaatttttgatataatatgcaggatggactgatggatatttaaaagataatgttcaaaagaattacaaatgagaattaaaaacatgtcagtttggacagaagtctctctaccatcatccatgcagaaacaagattatatgaaataaaaggagtaaccaatgtccggaaactattcaacacgtgaattccgcgagaaactatatgatgaccttcatgttcgattaagagatacagtgattttgatgtgttcgatttttattgcctctataggtctaaatatgaattcaacagctgtcattattggagccatgctgatttcccctcttatgacaccgattattggactggggtttggtttagctatttttgatacgcgtttaatcaagcaatctctaggggttttatttactcaagtattggtcagtttgcttgtctcgactctatatttctggatttctcccttatcttatgcaagtagcgaattgattgcacgaacctctccaaccatttgggatgttctcattgctattgcgggtgggatagcaggtgtcattggttcaagaaaaaaagaagcaaacaatatcgtgccaggagtagctattgcaacagctctgatgccacctatctgcactgcaggctatggtttagctaatggaaatgtacgatttttatttggggctctctatcttttcttgatcaactgtgtctttatcatgctaatcaatattgttggaacaagaattatgatgagacaatctcccttaagttcatttaaagagctaaacatgaaaatgagaattgggttgatctccttgattgtattattggttcttccagccagctattcagcagtcactctgacgatggatcaagcacgaaaagaagggatcaaacagtttgtaggaaaagagtttgccaatcatacgatcattaatcaagtctacaagtcaagtaacaatgaattggtcttgacggttgttggagatccgatttcagaagaagaattagaaacactccaccaaaaacaagactcttacggtattcaatctgttcaattgaaagtcaatcaagtccataattcgacaaaattagatagtgagacgaccaaggaattttacgaaaacattgacaagtatatcgatcaaaaactctctgaaaaagattctcaaaaagatctcgtaaaagaaaatgaagcagacaaggattgaggatattgaccttatctaactcgaggaagcaaatcttgggaggatatcctatatccaaaagttaatgggtagaaaggattgttgatgaggatactatttgtggtggtttagcagatcactactagctcagcttaatcaaaatgtaaaaaagcaacaactatttcagttgttgctttttaggtggctgagattttgttctaggttaaatggtttatttctcaacacgggatttatttgcaatatctgtaagaattaattctacaaatgcatccactgacatggtttctgtttctttttgaccataacggcgaacgtttacagcctgctcttccatttccttgtccccaacgatcaattggtaaggaatcttttgtgtttgagaagcacggatcttgaactgcattttttcattgcgttcatccacatctgcacgaacaccacggtcacgtagtttcttagccacttcccaagcatagtccacgtgtttttcgttcgatactgggataagggttacttggtgaggagcaagccaggttgggaaagctcccttgtagttttcaatcaagatcgcagtaaagcgttccatcgttgagataaccccacggtggatcataactggacggtgttcttctccatctgctccaatgtaatgaagatcaaagcgttctggaagcaagaagtccaattggatggtagaaagggtttcttctttaccaagagctgttttcacttggatatccaattttggtccgtagaaggctgcttccccttctgcttcatagtactcaacacccatatcatcaacggctgctttcaacatgcgttgagcattttcccacatttcatcgttgtcaaagtatttgtgtttgtcttcaggatcacggtaagacaagcggaatcggtaatctgtcaagttaaagtcttcatacacatcgatgatcaattgaaggatcttcttgaattcttcctcgatttgttctggagccacaaaggtatgaccatcattcagagacatttcacgcacacgttgaagtcctgtaagggcaccagatttttcataacggtgcatcataccgatttcagcgatacggattggcaattcgcggtaagagtgcacatggtgtttgtaaacttcgatgtggtgaggacagttcattggacgaagaacaaattcttctccatcccccatatccattggtgggaacatgtcttcacggtagtgatcccagtgacctgaagttttataaagttctacagaagcaattggtggagtgtagacgtgttggtagcctgctgctacttctttatcaacgatgtagcgttccaactcacgacggatggtcgcaccatttggcaaccagaatggaagaccttgaccaacttcttgagaaatcatgaagagatccaattctttcccaagtttacggtggtcacgttccttagcttcttcacgcatttgaaggtagttcttcaagtctttcttgtcaaaccaagcagtaccatagatccgttgcatcatggcattgtcgctattcccacgccagtaagcaccagcaacgttcagaaggtggaagatttggatgcgaccagttgatgggacgtgtgggccacggcagaggtctacatattcaccttgacggtagatcgttaacccaccttcgtcttctgagtgttcttcgatcaattccaatttgtatggatcatttttgaagatttcacgcgcttcatctttggtcacttcttcacgaatagatgggaagttttctttgacgattttcttcatttcttcttcgatacgaggaaggtcttcgttagagatttgaccagcttggttgtctgtatcgtagtagaaaccatcttcgatcgctggaccgacacccaaatggatatctgggaagaggcgacgagctgcttgggcaaacaagtgtgccgctgagtgacgcaagattggaagagcatcttcgtgatcaggtgtcacgatttcaatgcttccatcttcagtgatggcacgagtagtgtcgatgagtttgccgttgaatttaccagcaagggcttttttagccaaagaattgctgattgattgggcaatttcaaaagtagtaacgccagattcgaattcacgaacagcgccatctgggaaagtaatcttaatcatgattttctccttataaagtttttagtagctaaatgggtgggaggtgtctttgaacattggaatcatcactccttttgattttctcattaagaaatcaaaaaagcgacctcctcgaaaggacgtcgcaacgtggttccaccttcatttatgttcctcaaaaaagagggacacctctgattggctctaacgtagccgccgttttatgtttgcataaaagaatcacgagtagtcccaaacctatcctctacgcgatttccagccccacgcgctctctatcagatttcctagatttgatatgtctctgtcagttattatagcacgattgaaaaattttgcaagaaaaagtttcattttcaatcaaagaaatgcgtgattttacggattttctttacttgtttgaccgaagccttcatcatcttcacagatccattgaccggaagagcaatcaccttggtcgggattttcacaatggtcttagacatccgcttgacccgactttgctcaggattcaaatcatttgagaagtctttagagatgattttatccaagtaaaattcgtagacccgacggccaaaggttgctgcagaaatatcatcaatcttttctgcccacttggtctcatcgattgcgggcatctcgtcaatcgcttcaagaatcgcttgcgccagatcgctctcttcataaaagagctttccaaacataggatcatcaatcacatgatcgagataaggattgccatgagcgatgatcggggtaccacttgcaatactctctaaataggtcaacccttgcgtctcactcgttgaagctgaaataaagaagtcagccgctttatagtagagagctgtctcatttggtgggatcatccctgtaaagacaaccgcatctgaaatccccagtttcaccgcttgttttttcaaatcatccaaataaggaccatctccagccacgatcaacttaacttttggattgaccttgaggacatcaggaagggccgcgataacagcctggatgttcttttcataagagacccgcgacaggctcaataaaagcgtttcatcttctgcgacttcatatttttcacgaagagcagctgtctctgtcggagtgatttctggtcggtcaaacttggccaaatcaattcctgtcggaataatgcgtttttctgccttgaccttgtacttttggagcaagtcatagacgatctcactaggacagatcacgccgtccagatcattcatataacttctcacaatgtatttgaccatacttgggcgaatgaccatgcctcttgcaatatagcgaacatagtcctcatactgggtatgataggtatgaataactggaatccgcaactcgcgtccaatccacactcccaaaaggcccagtgaaaactcagtctgggtatggataatatcaagctggtattgcttggcaatggcaagcgcctttgagaatccacggtaagcaacgcggcggtccttaaaggcgaagaaaggcacacttggaatccgaatgatctgccaatcttcatagcggttcacatctttatccgttgtcgtaaagataaagaccgtgtgacccaatttttctaattctgttttgagcgtccgaatactggtcgccactcccgaaacttgcgggaaataggtatctgtaaataaccctacacgcatcttacatctccaaaactgtttgataggcttcgaccaattgataagccactaagtcgatcgaacgactttcagcaaccttgtagcctgcctcccgcttgtctacttgtccgttcaagaccttgttcaaggaatccacaaattcgtctacattatggcacaattcagatgacgtctcgtcaatccagccattgtatacgggaatatcccgcaagaccgtgtgctgatgactggccaaggcctccaaaacaacgattccttctgtttcttcataagatgggaagaagaaagcatctgaacccgtcatggccccttggaagaccgctcccttgaagtagccagggaattccacattactcggatgatccttttccacgatacgacgaatcttacgcggaatgatccatttgttgatagaacctagccagataaagcgcacatccggcatgcgacgggccacttctacgaaatcttcaattcctttacgtttaaaataaagccctgcacagatgacaaccttttggccttcttggatattaaaatgcttgcgaaagacttcttcttttttcggatccttcttgtatttttccaaatcaattccattggaaaccgcgataatcggtgtagtcaccccataagactgaatcaggtgtttagaatactcagatggcgtgatcacatagtctgccttttggtacatgtgagccaaatactttccaaacaagggcgcaaaaaagttagacccgataaaggaattttcaaaatcctcacgagttgaatggccatgcatgatgactttctttccacgacgctttgctgcatggagcaaaaggaaactccgtgggccataggtattgatatgcaccacatcataatctcctaaaatatctgtcgtatacggaatcccagccaaatcaagcgcatgcatttgatgctgcaaggctcgaccaattcctgatttttgtaatacggattttccttctaaatacagtaaaactttcataccttctattataccgaaataaagagtgcccagcaagtctctacctgtttgcagtataaaaaagaggctagaacagttctgttctagcctctcagactagtagacacgtcttcccaagtcgagactctagtctactaatccttattttttggtcgttccacgttggttgatcgtatgagacaacagtacttcgcgttcttccaactcttctttgtgcatgatcttagtcaacatgcgcatactgatcgcaccaaggtcatacaagggttggccaatcgttgatagatttggacgcgtgtaacgagtgacttgtgaatcatcgctggtgataatttcaaagtcttctggtactttgataccgtgatcagacaagccgttcaagagacctgcagccaattcatcccctgtcacaaaagcagctgttgcttttgacgcaatgatgcgttctgccaagttgtaaccttcatcgtaacggtacttggattcaaagacaagtccttcgctatagctcaattttttcgctttcaaagcttctttgtagcccgccaaacggatttttccattgatatcatccaccaatgggccgcttacaaaagcaattttcttgttgtgttttgccaactgtgtaacagcatcaacggttgcttgcttgtagtcaatattgacacttggtaattggtgttcaacatccactgtcccagcaaggacaactggcgtccgagagcgtgaaaattctgagcgaatcttttctgtcaaatgatagcccatgaaaatgatcccatccacttgttttgaaaagaggttgtttaccactgaaacttctttgtcatcgtcttcatcgctatttgcaagaacaatattgtacttgtacatttcagcaatgtcatcgatccccttagccaatgtagagaaatagctgttcgtgatgtttggaatcacaacaccgactgttgtggttttcttgctggcaagaccacgcgcaacagcatttggacggtaatccaagcgttcgatcacttctaaaacttttttacgtgtattttctttaacgtttttattcccatttactacacgactaacggttgccattgaaacccctgcttcacgggcgacatcataaattgttactgtatcgtctgtattcataagatttcctttcattgttgaaaatttcgttttcactctctaattaatcctattttatcacttattgtaaacactttcaagcattttggtaaaattttgtaaactcttgcttttttggggaaaatttgacaaaatagatccatagaaagaaggtagcattatgtctaaattagatcaaatcgtcgattttcttgaaactgaaaaaacagatgtcgctgttgtatccgatcctgtcaccatcaattacctgactggattttacagtgatccccacgaacgtcaactcttcttgttcgtctacactgaccacgaaccacttctcttcgttcctgcacttgaagtggaacgggcgactgcagttgtcgatttccaagtggttggctatgtggattctgaaaacccttgggaaaagattaaaggggctatcgcaaaaccagatgctaaaaccgttgcacttgaatatgataacttgatcctgaccaaattcaatggcttacgtactgtctttgaaaaggctcaattcaccaacttgacaccacggattaaccggatgcgcttgatcaaatctgctgatgagatccaaaaaatgttggtggctggtcaatatgcagataaggctgtcaatatgggattcgacgccatctcactggataaaacagaaactgatatcgtagcagaaatcgactttggtatcaaacgcttgggttatgaaatgagctttgaaaccatggtcttgactggaaataatgcagctaacccacacggaattcctggaagcaacaaagtcgaaaacgatgccctcttgctctttgaccttggctgtatggtgaatggttatgcgtctgatatgactcgtactgttgctgttggaaaacctgatgatttcaaaaaagaaatctaccacttgacgttagaagctcaacaagcagccattgacatgatcaaaccaggtgtaacagcacacgacgtcgaccgtgctgcacggagcgtcattgaaaaagctggctatggtgagtacttcaaccaccgcctcggacacggtatcggaatggacgtgcatgaattcccttctattatggaaggaaatgacatggtgcttgaagaaggcatgtgcttctcagtcgaaccaggaatctatattccaggtaaagtcggtgttcgtatcgaagattgtgggtacgtcacaaaagacggatttggactcttcactgaaaccagcaaagacttactttactttgactaatcctttagtcgtttcaatatataacaaacatcttgtttcgttaataactataaaaaatgaggctgggacaaaagtcctagcctcttaattatctttggattgtcgagcaagacgcagtggttgagtgggctctactacgctgatttcatcagcttttacagccctactcaactgtgcggaggtgggacgacgaaatcgaattctaacgaattaccgatttctgtcccactctcttttttcttatgaaaccgattcgagtttcattcttttctgcgtatcttctacgacgtcttttaaagtggtttgggacatttctttttccatagcagtctgaatgtcctcaagctttccatctaaaacattatggatattgtggccaattgggcaggctggattcggattgtcatgaaaaccaaataattgacctgtcgaacctaagcattctactgcttgatagatatccagcaggctgatctcatcggctgcttttgcgagctcagctccgcctgtcccacgcgctacatggatcaatcctgctttcttcaactgagacaaggtctttcgaataataacagggttgacaccaacacttcctgccaaaaaatcactggttacttttgttttttctccttgtagagcaatcatgatcaagacatgagtcccaatggtaaagcgactcgaaatttgcataacttcactcctttctacccgttttgaaggtagagtctattgaacaaccgtcaagggacgactttcgttattcctattatactctttttagttgtaatgtcaacagttacactattggaagaagtcttctagccaagcatcgatttctcgatcatgaccttctctctgctcaatctcatgaaggagctcatgattgtgggtatgatgaatgccattgaccaaactttcataatacacttggtaataaggaagatggaggtcttttgcgagttgcaattctttttggacatcatagtccacccgtctaaaatcgacatcttttagccccatttgatcaaattcaagaatagcatacatggcccgaagatccttgcgaagattcttttccaaaaagaaaggttgaccgatcgacccaggattgatgatcagttctcctcctgtcccgtaacggaaaaactgctggtgaatgtgtccgtagactgcaatatcacaagacgggtttgtcaccaagcgatcaaaatccttctgctcaccaatgtggatcaattcgcgaccccaattcttatcaggtaagtggtgggtgatgccgatctttaaacctgcgatttctctatggacctgcatgggcgttttctgcatgtcttcaatttcctggggcgtgatttcttcaagaatatattgacactggcgcatgaggtagcgatgactgggtctggtctcatccaacatccccctcatagcccgccaaagactatcttcccagtttccaaggacttttaccgtaatcggtaactcctctaacagctccaagagggcccgtctccccgtccctggcatcaaactatctcccaagagccaatattcatccaccttggcttttcgactatcctctaggacagcttccaatgctgtcgtatttccatgaatatctgaaagtaaagcaattttagtcatgatcttctccttctctccattataacaaagagaagaaaaacttccacccaaaggtgaaagttttatgaacattccatgctaccagaaatgaaaactcaggctagaagcggacgcttcgtcgttggatttatctttttccaaagagttgcttaacggctttgtatcttagtctactgatttgagggcttcgagcatgtctacttttcgaagataatggtcaacataaattcctaacaggatcaagagaaggagcattcctccgacagggaagaggaaaacgccaagtccgactttagggtaaaagagaatggcatctggtgcaatcatagcaatgaggaattgatgaagataataaccacccactaatcccatgaggatccctatgatagacaataagatggtttcgcggtaaatatagagcgtcacttccttattatggaatcctaagaccttaatggtcgataattcacggatccgctctgccacattgatattggttaaattatacaagatcacgatggctagcaagatcgatacgactactagaatcatcatagtggtgtccaaggatttggcaactgaattaaagagggaaatcatcgaagcattctgactaaccgccttcacagctgcaagttccatcatgtcccgactgacagcctgcacttgtcgtgtagaaggatttctcaactgcaccaaatagctatttgctgaagtccgctttccgtagattttttggtaacttgcctgatccatatagataaaatggccgacataattttcagtgattcctgctaccttaaaagtgtgaccatctaaggtcagtcgatcaccgactgtaacccgggctagttgtgctagcttactactgatgatgacccctttcttgagagacaagggctctccttgcttgagagaacgtaagctgataaagggagaaaaatctgtacgatccgttaccatcatcgtaatggtctgcttgtcgcgtccaccctttaaagatgcttcgatgaccttactatagatggctcgataatctttgatatctgatttttccagacgattggttagttccttgctttcttggcttgatgcattcgtttttttggctacaatcaactcatatgataggatctcttgaaattggcgtttgggaacccctcctacagaagattgaatccctagccctgcgaagagaagagcaacagaacctgccactccaaaaatggtcatcagcatccgttgtttgtaacgaaagagattacgagcagtgaccttgtgggtgaaactcagacgcctccaaataaaatggagacgctccaggaaaatcctcgaaccggataccggtggtttaggaagcaataaaagattggcttcttcttttaattccttgcgagaaacccagtaagccggaagcacactcgcgacaaaagacagtcctagcgcaatcagagtcatatctccataaaaatactctctgctctctccaatcaccatcccttgcgtaataatattggaaatgattcccgataggaaataatggcccagcaaggttcctagaagggtcccgatcgtccctgcaaagaatccatagaggacaaatttgagaatgatgtccttggtacgatagcccagcgccttaaaaacgcctgcattggtccgctcttcatcgacaaagcgggtcatcgtggtaaaggtcaccatggctgctaccagataaagaacgaccggaaaaatatttccaacagcagagatactactactggcattgctatacatcaggtaaccttgtccacctggcatggtcttgcggtcatagacatgataagttgggatttccagttgatctcgctccctttgagcttttttcagctcctcctctttttttgcgagctccgattcacctgcagtccagtccttctttttctgatccagttgttctttggcttgatggagcttttcttgactagctacttgctctttagctggcagaaatggagctaatttcttgaactgggcctcctgcaagtctaattgtttttgagcctgatcgatctgatttttagctgactggagtgtttcctcggcacgactgagttctttctggcctttttgaatctgcccatccgcctcctgcttgagtctttgatagcgggcctttccattgtctttcagaagtttttctaactcttcttgatgagctttgagccctttttggtagacttgcgaaaaagaatctaaagacttcagatcatcaaactggatccgcgccatcgcgggaagtttagtcgtaaagacctcttttgaaactagtgcataggcatctagatttccactgccactcatggcagtgcctaaattcttttgagaccacatctcagaggattgaacaaaaccaacaatggtgaattgctttcgctttaaactagagcgcgttccagccttttcttcaagtgtgagggtatcccctatctgatagcgatcctcccaaaaatttgctagggccagttccccttctttttggggcaggcgccccttggtcacacgaaaagaagaaagactttttggggcagaaaaaagtcgaattgcctttcctgttcctctcactgtcagatctagcagtaaaccaaattcgacacgcgctcctttgactcctaaaagttcctcttggtctgcctggtctaatcccaagtcccccatgacagcaagatctagcatcttttgttgctgaataaactggttagccgttcggtgcatatttggagtggtcacctttaggcctaccaaggccaagcttcccaacaacatcaaggttaagatggagagaaaacgtccttttgaatgtgtaaaggaagcaaatagatccttccaatagacttttcgtttcatgctaccacctcttctaatattctagcgtagcaatatcttgaggaagctcattgatttctactgacttgaccttggcatcatgcatgcgaatcacacggtctgcaatcggagctagagcaccattatgggttacgatgatgaccgtcgctcccttttttcgagacatatcctgtaaaatccccaatacttgcttacccgtctggtaatccaaggctcccgttggctcatcacaaaggagaattttagggtttttagccactgcccgagcgatcgccacccgttgttgctctccccctgacaattgggcaggaaaattatcaagacgattgccaagtcctacttcttttaaaacagcttccgaatctagagcatcagaaacaatttctgaagccaactcaacattctccttagctgtcaaattagggaccagattataaaattgaaagacaaaaccaacatcatctcgtcgataatccgtccgttgatgagcattgagttttgcaatatccactccatcaatcagaacctgaccctcgtcattggtgtccatcccccctaagatattgagaaccgttgattttccagctcctgatgctcccaaaataatgaccaactcgcctttttcaatctcaaaggaaacatcccggttagcgaaaatctctgtctctccgctcgtatagcgcttgtaacagtgctgcattttgatgtaggccatttcctctcctccctcctacttcctatctatattatagtccttttctgatagattacaaagaaatcgaggtagtagaaaacaaggttatcctaaattatcatgaactattataaattttatgctataattagagagaaatttgatttattcttagaaagaaggctcatcatgagtttacaacagtttgaaaggaaatctcttcaagaaatcaaccagtctattgacgtgccaaaaggcatccccttttggaagactcttctactcttttcaggaccaggaagtctggtagctgtcggctatatggacccgggaaactggattaccagtgtggtcggaggggcacaataccgctacctcctcttatcagtggttcttctctcctctttaatcgccatgcagttgcaacaaatggctggtaaactaggaattgtccatcgtaaggacctggcccaaacaaccgcccatcacttgccaaaatggcttcgctataccctttggattgtgatcgagcttgccctgatggcgacagatttagcagaagtcatcggatcagggattgccctccaccttctttttggctggcccttgcttttttccattctgatcaccatctttgatgtcttcctcttattggggctcatgcatctaggatttcgaaagatcgaggccatcgtatcaaccttgatcctcacaatccttgcgatttttggttatctggttttcctatcgaaaccagatatcgggggaatctttgctggattcctgcctcaaaaagaagtactgggaattgggcttccaaaaggaaatgaagccttgaccttggcacttggaatcatcggggcaacggtgatgccccacaacctctacctccactcttccatttcgcaaacgcgaaaagttgattataaggatccagcagatatcaaacgggcagtgcgctttatgacctgggattcaaatattgaattgagtttggcttttgtcgtcaactccctcctcttgattcttggagcggccctcttcttcgggcacggagataagattggtgctttctctagcatgtacaatgccctcaaggataaccatattgctggtgccatcgcaagtcctttcttgtccactctctttgccatcgctttgttagctagtggtcaaaattcaaccattactgggaccctaaccggtcaaatcgttatggaaggtttcttgcgatttagactaccacaatgggtggtgcgtctcatgactcggatcattgccctccttcccgttatcattgtcgcaattttattcggtgaccaagaacatgtcctcgatgaccttctggtatattctcaagtcttcctatcagcggctcttccattctccatcttccctctggtttatttcacctccaacaaggaaatcatgggagaacatgtcaatgcgaaatggaatacgttcttaggctatctcgttgcgattgtcttaaccatcttaaatttcaatttgatcgtgacaacttttatcaaataaagagagagtgggacagaaatcggtaattcgttagaattcgatttcgtcgtcccacctccgcacagttgagtagggctgtaaaagctgatgaaatcagcgtagtagagcccactcaaccactgcatcttgctcgacaatccaaaaataattgagagactaggacttttgtcccagcctcttttggtttattacactcccttttccatcttgctcctccatttcctaaaaatttcctgaccatttttttaggagggaattattttaaatcactaattattgtgagattttcacaaaatcttgtcagtgcccgtcattcataaacttgtaaaatttttgtacactttccgttatctgtacaaaaattagaattgttgtctaatttattcttttggagtataatgctatttgttagtgccgtaaaattatttaacatataaattattttaacgtcaaataaatataaacagattgatacaactacagaaaggaacatatggtacgccaaagacaaacaacaaccaagtcagacttacgaaatgcgctctcaaaactcctcttgcaacaaccttttgaaagcatcactattcgacaattaactgaaaccgctgggattaaccgcgggaccttctacttgcactatgtcgataaatacgatatgtttgagcaaatgaaaatggacatgatgcaagaattggatagcctcttcgttgaaggaagccctgtcaaggtaaactttctcaatgtcttgactgctattaaagagaattatgattttatttatgcattgtcccaatcctgctgctcagacttccgtaaactaataagaagttttaccctccatgcattagacgatactccccatgcgaaagaacacatcatttcagactttcaagttccatacaagtatgggctagaaattttcatcgctacaatcgaatctgtgattgtgacctggttagaatctggtgccaaggaagagccaatcgaaatcgggacgatcattcttagcgtctgcgactttgctaactggaactaaattccccaaccttttccttcctttatggagaaggtttttctttttggcaaataaacaacattcagatcaccttgtccaacttgtttgtagaaagcaaaaaggcaggatcctaacatcctacttttagaatgtagacaaattactttaaagtaaaataagttaagcgattttgcaaaaaaaaataaaaatgagttccaatttttaaatcgattcaagaaaataccgaaactttccgctgtgagaaaagtgcctgaaacaataacatttcaggcactcgggagttttgagaccctaggctcaaaactaagtcttggaacttcgaagaagttcgctgacgtccgtactcacctaaggaaagttttttatatgactttgtcttcaatctgaaggcaggatcttaacatcctgctttttctttattttttctttgccaacatggttgcaaatcgaagttgaatccgatggccattttcatctcgacgatggagatggcctggattttcattgtacttgaccaactcccaatccttgtaatactccgccaattctccttctttaaaggtgaacgagaagggcatctggcagggataatcttccgtatccatggcacagacaatgagattgtagccacctggattggtatgctcttgcatattgcggataatcgctggaatccgatcagcctctaaaaacatgaggaccactgtcgatacgatgaaatcatagttttgggtaagagctgcagcattgatatcatagagtcccactggcatatctagatcttcctcagcgacaatactttgtaagatatcaagagccagttcattttgatccacagctgtcacgtcaaagccatgttgggccaaaaagagggcgttgcgtccttgcccgcatcctagatccaatgcctttccagcggggacaattcccactgcttctagcacttctgaatggacaggattggtattgtattttttggggaaatagtcttttggctcacagtaaaattctaggtaccactccacatcgtcagtcgccgcttcgacacgatgccaggcctggggctcggccatggggttctctgctcctgtttcaaagaggtggctcgcgatttcttccccctcttcggtcaattcaataaatcgtaactgaccttttaaaactgtaatcttcccccaggttcccaccttggtattgtgctttctttgaagagcttctggcatggtatccttggtccagataggcatgcgtttgtaagcgatcaatttttgtgtcatactgcttctcctttttctttcagtacccttatcatacagaaaaaagaccctttttacaagttggaaaaagaggctccgctttctagcgaaacctccttgttaggatctattcatcctctttattttttgattttttataaaagaatccagctaaactaaatccacaaacagccaatactccaagaaggactgagaagaccacacttgaatcttgggtttggctagcctttttaggggtatctccaagagcttcctgacaagtttctggcttcttatctgaaggatctttttcagcagcagccattaagttcgctttattatagccatcatagacaaagtctgcttccaagcccttttcttcacggatcttatcttccatttccttttcagtagccttgatttgtttgaagatcatatctgcccgatccatggattccttggtgacttcaccttgaagggctttggcttgatcatctgtgaggccactgtatttttgatccaaagcagcttgttccttgatccagccagcctccatttctttccacttatcttggatactggtgccaaagagatctggatatttcatgaccatttggtcgatatgccaaacagcccaataccatgaagttggatcgtacttagcagagcggactttaaaggcaccgtaggtgtcattgaccaagccatagaatgggacatatggggtattccgactttgggcaagacccaaccaaacaattccaccaaatggacttggcaagtctttcttgatttgatagacatgggcatcaatgacgttttcatttcctaaagcatacttgtatttcttggtatcgacttttttacctggttcggccaagtcatctgctgtaaattgtttgaggtgttcaaaacggttccgttgttcggcaaaaacatcttctagactatacttcttagaaggatccgttggtttacgaagcagatcaaagtgttgatcatcatatttgacatctgcctttggatccatcagggtaatccctgcataggtccgtgagcggttgcgttcggtgtattcgtccggaccataagagtccgcaatatggaacttgccatccttatccgtcttgtaatggtcggctttcttagctactgcttctacatcttttgaagcaatgacattgtccttatccttgagatccacatgtcccagatagtaggtattggcaaaaatagcatagcggtcttgtgggaatttaatggccacatattggtgacctgagaggatttccatgtaccagagctcatttttatctgctacgacaataatattcccttcagcagaacctttttcatccagagtcttggcaacgatttcgattccttctcgagcagtttttgcacgaggcaagaccaagtcgatcatggaagcttctggtaggccatctttgaccaaagggtcggctttcaaaatcttgtcatgcggagtcgctgataccgtcgctgtcatcgacacgcccacttcattaaaaccatgagctccgaagttcccgttgctaccatcaccacgcgcagcatcataggtcgctgtgtacttcatttcatggctcaaatgaggataggtaaagccattggactcatcttcgatcttatccccttccttgtagtcctttgctggaactacaacaaagttttgattgtggcgcccgccatctggtgcatagggatagtcctctgtacgaccgtaaagcatagagccatccgtggttaagtcctttcccacaatgaaggcggaacaggcttgtgcaacctgcacagggaagagagcgatcagcatgaggccaaacagtagtttgaataggattttcttcatagtctttctccttattgactacaaaagaggctagaaaaactttcaagcctaagaaaagcaactataccaacaccctaattttagtatataatataagcaattgttttgcaagcgattacaagcagaaagcataaaaaagacagatctgaaacaagtttcaaaactgtctttttctttaacgtgtattgtattgtttcatgacccgtgcgatgtcccggttttgttcccgactcttgatggattcacgcttgtcataatcatgtttccctttagcgagtcccaaaagcaatttggcatagccgtccttgagatagaccttcaaaggcaccaaggtcattccggtccctttggtgtcttggtccagcttttggatttgctttttatgaagaaggagcttgcgacgacggtctgggtcttggttccagatattgccttcctcataaggggcaatgtggacattgctaagccaaacttcgccattttttacttgtgcaaagccatctttcaagttaatgcgtgccgcacggacacttttgatctctgtccccgtcagcaccatccctgcttcaatcgtatccacgatagtgtagtcatgtctcgcctttttattttgcgcgactacctttccttcgccctttgccatgtttggctcctttctttgctacttccttgtaaaatggtttcttcccttttttctttttggatttagaggaagaatctttccgcttgtcatcttttctagcggttgatcccttagaaacttttttgtccttgcgtctgcgatctctacgattgccatctcggtcacgtcctttagacttgagacctttttcgacgacatcccattcacttggaatataagagaaatcaatctctcctgtcatcttgtcggctctttctaccttgatccggatttgctgacctacacgaaaggtcactcctgatttttctccgcgaagggttagatcccgttcgttaaaatggtagaattcaggaagattggtaatatggatcaagccttcaaccgtatttggcaactccacaaagagaccaaatttcaccacactggaaaccacggcatcgtactcttccccaacaaagtcttccatgtattcagccttcttcatggcttctacttcgcgctccgcatcaatagcccggcgctctcgactagaggattggctggcaatgtctggaaggacttgttcaaagtgttcagccacatcttgagattttccgtattcgcgcaccattcgatgaaccatcaggtccggataccgacggatgggactggtaaagtgggtataatactcagcagcaaggccatagtggccatggttatgctctgagtagcgagcctgctgcatcgagcgcaacaacatcatcgaaaggacatccgcatagggttctccttcgaccttgcgcataatttcttgcagggcttcttgactcatctcactagccgttccgtagatttggattccaaaactagaagcataatcgataaacttctgtactttttctgcctttggatcttcatggatccggtagatgaacggtagtttcagtcgcgtaaagtgctccgccactgtctcattagcgatcagcataaaggactcaatcatccgctcggcaattcctctttgacgcaaaacgatatcgaccggttttccttctttattgaccaggattttagcctcattggtatcaaaattaagggcgccgcgacgaatccgcatgctttctagaatgccatgcaaggtggccatttgatgaatacttgggacaattttcttaaaggtttgagccttttcttcgtctcccgctaagatatcattgacgtcgctataggtcattcggaaggttgtattgatcactgtttgggtaatggtatgcttgacgaccttgccatgaggatcgatctccatgatggcagactgggtcaggcggtccacattcggatttaaagaacagatcccattggagagacgctctggcaacatgggtactactcggtcggtcacatagacagaggttgcccgatttagagcttccttgtcgagtgctgtaccttctgtaacataataagaaacatctgcgatgtgaacacccagctcaaagttgccgttcttgagtagcttgatatggactgcatcgtccaagtctttggcatctgccccatcaatcgtaaaggtgatctcatctcgcagatctaaccgtccctctaaatccttagcagacggtgcatctggaacctgatcagcctctttcagcacttcttctggaaattctgagacgatgtccatggattctaacacttccaagacatcgattcctggatctgtcacatgaccgaccacatcccgcacagtcgccacaaaataattgtgtttgcggctcgggtattgatcaatttcgactttgaggatttcggtcccttccaattggatggctggcttcttcacatagatcagctggctgatcttttgatttttcgaacgaatgtagccggcatatttaggcttttcctcatccaggacaatttgtccaactaccgttttaatgctatgctccaagacatcaataatcttagcttctgctgccgttcccttgtttcggtctgctaccttggtaatgacgatctcaacggtgtcaccatcgatagcgtggttgacatcatttcggccaacaaagaggtcttcttcttcgccttctaaactgacaaagccaaagccattcttatgcgcatgaaagatccccttgagggtaatagctggggccttcttttgagccaaacgaagagagccatcatcttcgaatttcaactcatgacggcgttccatcagagagatggttttgaccaagtcacggaaatccttagacccttcctttcctagagctgctgccagatcattgatctgggctttgtcatgctcttgtaaatattctttaatacttgttttcattgatttatttgctggttatccagcctccttttttctatctacttgtgtctttgttttacaaaataaaaataggcaaagacattgtctgagcctatcttatctactagaaagtaccattaagatcatcgcgatcaataaccaaaagaagatcataatagctgttaaacgctgcatcactgcttcaaacccgcgcgcttttgaacgttcaaacaagtcatttgagcttgcgtcaaagacgttgctcgattggttttttgttggttgcataaaaattgcgataataatcaatactgataatactagtaaaatagttgttaatgctccgctcatattcaaaactccttaaaatcttcactattataccatgaaaatcattttgattcaatatgtaaggttacttttctttccttgggacaatacttcaagacctcgatcttttcaggatgggttttggtatttttactggtcaaataattctgactcccacagctggtgcaggtcaattgaactttaattcgcacgtacgtctctcactttcaaatactttctaaataagaataagaggaacatcaaatcggtaaaggccaaaagggctgtaccgtaaaatacccaatgatagccaaaatgcatgaaaatactcgatcccatcattggccctaatacaccacctaagtaataaaagagctggttgtagctaaagatccgagaaatcccttcaggaggggttaaacgattcaataatgcagaaactccaggtagtagggctcctgtcccgatcccaaagaggaagcgtaaaatccctaattgaaggggtgattgcgcttgggcacaaaggatatagagacagccactataaagaagggcgattaataagagccggtgattcccgattcggtctccgagttttcccatccaacctgaaaagagcatactagagactcccatagctgaaacaatcatccccgatacaaagatcaggttatctctttgtcccaaagctcgcacataaagaggcaggatcggagaaatagattgggcgatcatttgaatggtcatgctggtcaaaaagagtcccaagaggatatctttttgctgaatagacatgagcaactgccaactggatttttgttcttcttttggaaggggctcatactcttcctcaataccccagaaggttaagagggaaaccaaaaataaaaagaagccgaccaagagaaagacattgcgcattcctagattttcagcaatgagtcctccaatcaaaggacccatcaaggttccagccacgacaccggtcgacaaagtccctagggcatagccagattggtccttgggaacttgactggcaatcagggctgtactattggggacaaagcctgaaaagaccccattgagcaagcgtaggaccaagagccaaaagacggatgggacaaaggcaatgcctcccatggtcagcgtcatggcaatggaagctctaagcatcatgggttttcgaccatagcggtcggctaggctcccccagatgggagacatgatcgcagaagtcacagaagaacttgcgacggctatcccagcataaaagggaacagccttgcccgtaacacctaactcttccacaaagagggccataaaaggaacgactaaagaaaggctggctccgatgaaaaagcagccgatccaggcaatatatagatttttacgccaattgatttctcttgtgataaaatcatcttctttctaattgttgtagggctgcatctaattgggcatagagggccgttagatcgtcattattgtctaagaccagatctgcatggactcttttttcatctagcggcatttgagacgcgatgcgttcttgggcctgcagttctgataagtggttgcgttccatcagacgtttgagctgggtttcttttgatacagctaccaaccagacagattcaaaccactcttcatagtgctgctcgattaagagaggaatatccataaaaaagagatcggattgtgcagcttgtctatctcttacctcagctagagcctcacgaataagcctgccttgaacgcgattggaccagtctcgttcactaaggtctgaaaagatccgctgacccaaagctaggcgatccagctctccttctttggtaaggatctctctaccaaaatgatccactaggacacggtagagggctcctcctggtgcttgcaaatcatgaaccacttgatcagcatcaatgacaggataccctttttctctcagataggaggtgacagtggactttcctgaagcaatccctcctgttaatccgatgattctcgccatctagttctccttttgacagtgggggcaaaaatgggttccgcgtccccccagctggattttctcaatcggtgtcccgcaacgcaaacaaggctggcctgttttcccatagacctggtgttcttcctgcatggtgccatcttccccaaaagcattgctgtaggagcgaatggtggagccacccttttcaacagcctgagcaagcacagcaatcgtttctttgcggattgctttagcttctctagcagtcaagctttgacccaaacgggctggatgaaccttggctcgataaaggacctcatccacatagatattgcccagaccagccactaatttttggtctaaaagagctgatttaatgggtttctttgattttttaagagttgcttggaaggctggtgctttaaaatccgcttctgtcggctctggaccaatttttttcgccaaaaaatagctgtcgacaagctcaggtatgaggacttccatggtcccaaacttacggacatcttcataaaccagggtgctgccatctgtaaaatgaaagaagacatgggcgtgcttgcgaagagggacttcgtctggataaaagaaatacttgccttccatccgcaaatgcgagatgaggaccagatccgtcagataaaacaagaggtatttcccgcggcgccccatggcccgaatttcttgccccgggagatcttgacgaaaagcatcccgatccgtctgaatcatctttggatactttacttccactgactggatggttttcccaagaattaatttctcaagacctcgtcgaacggtctctacttctggtaattcaggcatagaactcctttcaaaaacaagaagcaggccttctgcccacctcttcttaatattctttttcgttgtatccgaaatcggcaagatccaatttcttatcccgccaatttttcttgactttcacccaggtttctaggaagaccttgtcccctagcatgagctcaatatccttacgcgcaagggttccgatcttcttaagcatggcgccgccttttccgatgataatccctttttggctatcgcgctcaaccatgatggttgcacgaatatggaccttatcggtttcttcatcccgattcatagaatccacgaccacggcaacagagtggggaatttcttcccgcgtcaagtacaagaccttttcacggatcatttcagagaccaagaaacgctctgggtggtcagtaatttggtcagcagggaaatattggaaaccttcttctaagttttcgctcaaaatatcaatcaaacgcgaaacattgtttccttggagggctgaaatcggcacgatttccttgaaatccatctgactacggaagtcatcgatttgcgccaaaagttggtcagggtgcaccttgtcgatcttattgaccaccagaataaccggcaccttagcagccttgaggcgttcgataatcatgtcatcgcccttcccacgcggttcatctgctggcaccataaagagaacggtatccacttctcgaagggtgctataggccgactccaccatgaagtctccaagggctgtctttggtttgtgaatccctggggtatcgataaagacgatctgttccttatccgtcgtataaatccccataatcttattgcgcgttgtctgcgccttgtcactcatgatggcaattttttgccccataacgtggttcaaaaaagttgacttcccaacattgggacgtcctaaaatggctacaaagcctgatttaaatgtcatattatcctttcacgagggcatactccctcttatccaaataccaaggcccagaatttgggcacaaaaatcaccagtcctgttagtagggcaaagcctgatacgacgaggactgctccagctgccatgtctttggcattctttgccaacatggagaaatggtagttactagctaaatccaccacattttcaatggctgaattcataatctcaaaagcaatcaccaaggtgatgctgagcaacaaaaagagccactctgtcgcagaaatcctaaataccaaaccagcaagaattgctacaagggctgataaggcatgcttgcgcatattgcgctcttctttgatcgacgtgaaaattcctgttatcgcaaactccaggcttgaagtgaagtcccgatttttccattttcgcttattgtcttgtgagtccataggctgtcaaaatctcttcctgtaagccaaacatttccttttcttcttccggcgtatagtgatcatagccattgatgtgaagaaaaccatgtactgccaaaaatcccatttcgcgctcaaagctgtggccatattcttcggcttgctcacgcgctttgtcaattgaaataaagagctcaccaatataggtatcgaattctgccatcatctctgccaattctggattttctgcaaggtcttcctcatcaaaagaaatctccatctctggcttgtattctaaactgatgacatccgtcggacgatccgtatcacggtattcaagatttagttcatgactgcgttcattggttacaaaagtcacagccatttccttgtcttctttcccaattttttgagcagcaaattctaaaatttcttgcgtttgttttaagatttcgtcagagacttgaccagtctcatctaccatttcaatatacatctggatcacctcactattatcacttcattatagcataaaaccagcctatatactagatacaggctggttttcaatctttttctttgcaggacaatcttacaccactgtttgctggatggcattcatctgggcataaatcccgccttgtgcaaccagttcctcgtgtctaccacgttccacaatgcgtccttcagataagactaagatctgatccgcatcttgaatagtggacaagcgatgggcaatgataaaggtggtccggcccttttgcaggaccgccatagcctgttggatgacttcttctgtttccgtatcaatgtgagaggtggcctcatccaaaatcagtatttgcggattcatatagagcgtccgcgcaaaggaaatcaactggcgctcgccacttgaaaaggcagatcctttttctacgactggatggtcgattcccttttcaaggcgctctacaaaaggccaagccccgacttttttcagcgcatctttgaccgcatcccggtcaatataatcctgactcatggccacattactagcaatggttcctgtaaatagataaggatcttgcagaacaatgcccatgtggcttcgcaggctctcacgagagacttggcgaatatcttgaccatcgatcaaaatcgctccttcttgaggatcatagaaacgatagagtagattcataatagaagacttacccgatccagtgtggcccacaagagcgatgctttccccgggactcgcctgaaaggcaatatcctgtaaaactggcttgccttcttcataagcaaattgaacatcatcaaacacgacttgagccttttctatcttcagttccgataccccgtcggcctctaagggttgatccaaaaaggcaaggacgcgactccccgtctctagtgatcgccgaatattcggaaattgacgactgagattggccatgagatcaaacagattgatgacatagttaatattgataaataagaaaccagctgtcacaccgatattgccctgtaggaaagaaatcccagcgatggtcaatatacctgcaatcactaaaaacttgagcaattctgtcaaggtccaagaagcgatggaatcagctaagaggatccgatcattggctcctagcatcttctgggtagtggcttcaaactcctctaccacaccaggttcttgatgatagagctgaatcatactggcaccatgcaagagttcattgacttgggtattgacctcgcttctcgcatcaaagaaatccttcatgggctggtccgtcatgaccttgtagagatactggattccatagaaaattggaaaaaccagacacaagagtaaccccatcataggactcaggtaaaagagaatccctaggataaagagaaatcgcaccaaatagatgactagtatcatacaagagttataaaactgggtccgcaaggtctccgtatcattgacaattcttgttgcgatctttccagccggcttgtcatcaaaataagaaataggcagaccttgcatgacttgaaaggcttggtctctcagactggcggttacttgattacttccatgcaataagatccgatttcctaggtagctaatcagctgtcctaggctcaagactaagagataaaatgctcccatctgaagtagctcaccttgccctccaccatgcgtcagtgcagtcaaaggcccatcgatcatcttttggagaagaaaaggagacaattcagaaaaaatggtggctagtaagagacaaataaagccggaaagaaaaaccgtcggataaagagtgatccgagataataatcgtttcaatactttcatcttattctccttcctgtttttgttgccgttggtattgttcataataccagccctcttgagccagtaaatcactagctctaccttcttccacaatctgtccttgatccaagacaatgatccaatccgcctgatgaaccgcagacaagcgatgggaaacaatgagggtcgtcttgccttttcgctctgtttgaatggtgtcaataatggcctgttcagtcttcgcatctactgccgaaagggaatcatctaacagcaagagatccgcatcccttaaaaaagcacgtgccaacgagatccgctgtttttgaccacctgatacagagacccctttctcaccaatcatggtgtccattccctgagacatccgctcaagatcatctgcaaaagcagcttgggctacagcttccaccaaatcctcttcactagcaccatttttacccagagcaatattgtcacgaatggattttgagaataaaatatgttcttgggaaacatagccgattttagcttcaatggagtgtcggttgtagtccacgatcggttgctggttgaccaagaattctccctcaccaactgggtactgccgcaagaattgtcgaaccagactagtctttcctgctccggtacgaccaacaattccaactgtctgtcctttctgaatggtccaatcaatgcctgatagactctttcgctcagcaccaggatagctgaaagaataatccttaaactgcaccgaatcaatctgctctaaatagttaggaccatctggttcgagatcatccgtttcatcaatcacttcttttaattttttataggacatttgccctgtctgatagaccaagatcaggtccgccatcatccacataggttcaattaaaaagaccaaatacagctgcaaagccaataacttgccaaggctcaattgcccgcttgctaaggactgacctccaaataccaagagtaggaccgtcgaaaaaccaataaacaacagggctaaggggccaaaagaatattggatagaagcaattttgtcccctgttttggatagactggctgttttcttctgaaactgtttgacctgctggtcccgtttactataggccctcatgacccgaatcccttcgatggactccaagacttcatcattcaactgagcaactgcttcccggttttgctcaacataatcctcctgctttctactcaaaaaataggtcgagacgatgaggaagatcatgggaataaaggaaatcaaggttaattgccaagaaatgaaaaacatggtcggaataataaaggcaaacaagccaccaccaaacaggagcaccatcatcccataaccagccatgtcggccatgccatcgacatccgtcgtgaaccgcgtcaagagatctcctgaacggaatttttcaaaaaagggacgccgcatagctactagtttacgaaaagcttgtccctgaagggtcgccttgaaatgaactgacgactgaaagaggcgcaactgccaataaaaagccgtcaggtaattgaggatggctgatccaaccaagaggaccatatcccatacaaagttggattgcgtcagcgtctgctgactcaaatgatccactagacgctgaataacttgcgtcgggatcaataaggtgtaatcataaaggatcaggaccatagcgatcttcacatatcgccacttgcgctccctgatatactcccaaatagctctgatcatatattctccttttcaaaatggcacagaaaaaacccaagcaaggagctgagtaggtgctcagtccacacttgggccttctgatgcctgtcaccaattcagttaaggcaggcaaaaatgcatacaaaaaacccaagacagactcctccatcttgggtttcattcattgtttacatcgaactcaactgagattggagaagctgtgtattcaattgtgtcatcaaaacatctactttgttcatgatggttttctcctttctctttgttgctctaactttaccacggatttctgtgcttgtcaacgtttttttgaaaattgttgaaaaaggcaaaatttttaaaaatggactcgcaaaaagagaagcctaaacatctagaagcttctctttcatactatgactatgctagttgccgggattgaaccggcgacctcatccttaccatggatgcgctctaccgactgagctaaaccagcagtacctatctactatatcatggagataggccttttgtcaatatcctgactcatttttctgtcaaatattcttcctttgtgaggacataatggactctcgtcaccattcgcccttcttcatgcagatctagcatcgcataagcttcttcgtgggaaaattgcatccctgctttggccatcacccggccagaagctgggttatccttgtcataaacggcaatgagtttgttcatccctaactgttcaaaagccagggcaatgactgccttggtagcctctgtcgcaagaccttggttccaatagtctttatttagaacatagccgatactcccctttttcagacaaagatccaaatccagtaaatcaatcgtcccaataaattttccattttctttgagctcgatcccccatcttccaagtgggttcgctaggtaaaaaagggcaatattattacgcgtctcttcaagactttgattggttggaaaagtgtagcgcgtaacagcttcatcagaagcgtactcaaacatagccggtgcatcctcaagagtgaccggacgcaagtgcaaacgctctgtctctatttcacgataagccgctaacttcacatataaattttccatttgacactccttctttagggattagtttagcaaataacctaaaggaaggcaagctcaaatttttcttgctttttaaccaacttttctatacaataaaatcaattaaaacaatcagataaggagtgaaaaggtcattgagtcaagagagaaatctcacaccaatggcctttttacacctaaatctgagcaaggaggcaagaatgctcattggaattccaaaagaaattaaaaacaacgaaaatcgggtcggtttgacacctgctggtgtacaaagcttggtgaagaaagggcatcaagttttggtggaaaccaatgccggactcggttctggctttgcagatgaagattacgttaaacaaggggcaaccatcgttgcgactgctgcagaagcttgggacactgagatggtggtgaaagtcaaggaacctctcgctgaagaatacggcttccttcgcgaagacctcttgctcttcacttacttgcatatggctgccgcacctgaattagcggacgctatggtcgcagcgaaaacaacaggagttgcctacgaaacggttcgtgaccttgatggccaattgcccctcttggtgccaatgagtgaggttgctggacgaatggcggtgcaaatcggtgctcacttcttaaccaaacaagaaggtggatctggtgtcctcctaggtggggtgccaggtgttcccaaaggaaaagtcaccatcatcggaggtggggttgttggaacccacgcagctcggatcgcccttggacttggtgcccaagtgaccatcttagatatcagtgccaaacgtttagctgttctggaagatgtctttggtcaccaaatccaaaccctcatgtccaacccctttaatattgaagccagcgtccttgatgccgatgttgtcattggggctgtcttgattcctggtgctaaagctcctaaattagtgacagacgatatggttaaacaaatgcgtccaggttctgtcatcgtcgacgtagccgttgaccaaggtggcgttatcgaaacagcagaccgtgtgacaacacatacggagccagtttacgaaaaacatggcgtgctccactatgctgttgccaatattccaggggctgtcgcacgcacttctaccatcgctcttaccaatgtgacccttccttatgtcgaagctttggctgacaaaggcttccataaggctatcgcccttgatgaaggcttgcgagaaggagttactacttaccaaggccatatcacaagccaaccggttgctactggtttagagcgtgacttcacaccaattgatgaattggtttaaactatcatatatttaaagaattaccatcgaaaaaacaagttattttgagttttttaaatcatctttagagactttccgccgtgagaaaagtgcttgaaacaatttagtttcgagcactcggaataattgagaccttaggctcaattattagtcatggaacttcgaagaagttcgctgacgtccgttctcacctaaggaaaggccaggagatgattttatcgtcaatttaaggcaaagatccgaagatctttgcctttttattctgcttcttcttccacatccggtttttctttgagcactggatttgggattggctcgtaggcccggataatctctgctactactggatgacgaacgacatccttggcagagaaatgcacaaagtcaatttgagaaatgttcttcaatttctcctgagcatcaatcaagccggatttaacatttcgcggaaggtcaatctggctagtatctccattgacaatcatcttagagttaaaaccaagacgggtcaaaaacatcttcatctgcatgatggtggtattttgcgcttcatcgaggatgacaaaggcatcgtccaaggtccgtccccgcatataagccaaaggcgcaatctcgataatctcccgctccatcatccgagttgtttggtctttccctaaaatctggtaaagagcatcatagaccggtcgtagataagggtctactttttctttaagatcccctggtaggaaaccaaggctctctccagcttctacagcaggacgcgtcaaaatgatccgcttgacctgaccacgcttgagggcagtcacagccaaagtcactgctaggaaggttttcccagtccccgctggtccaatcccaaaagtgacatcatggttcttgacactatcgacatagatcttttgaccaagcgttttaacccgaatgggcttgccgtaactatccttgataatctcttcttcatagagagcgatgaacttatccaattcaccatttctcaccatggtaatggcggtcaccacatccggcgttccaatggtcatgccacggttaacgaggaccaaaagagcctggatgacttgacgaacctgctcgcagctttcttcttccccaatgatttggacgatttctgttcgggcatgaatagtcaccccaaattcttgctccatcaaacggagatggcgttcgttagatccaaacaaatgaaagagatcgtctggatgcgttaatgtaatttcaactgaatgttcttgcaaataaagaacctctctacctgtgtttttctattattataacaaagaggccgagaaaaaaccatcctcgacctatccttctctagtgggcttggtattcttcccaaatcgcatcaaaatcgccaagattaaaggaaaagctggcatgctcttctagatagcgactgacctcgtcgaagtcatctgtatgcttgggaaaagcagactcgtgaaatgcaagatctgctagaatggccttaggagcattgcttttaggattgcgctccgtcatcagccaagtataaaacgattttcgcataagcctcctcttagatcaactctgttccaaactggtcttgcttgatttttttggccttcatcaaaccacccaaagcctttttgaactgaccttttgaaatcccaaaagttgctttgatttcttctggagaggacttatcattcaaggtcataaagccaccattggcttccaaataggtcaaaatcatttgggcatcgttttccaacatttcaaaggaacgtggcttcaaagatagattcaaggtccggtccacctcacgaaaaccaataacgcgagcatttacgacctctcccaaacgaggttctgcatagcgctcacttgggtggataaagcccagcatattgttctctggaaggtaaacaaaagttccagacaatttcaagcggtagacaatggctggccagttttggttttgcatattgttataggctggacgagccaaacgctggaaatcttcctggtaggctaagatcccccaaatccgatctttcttatcgacttctaaacgaatatagagacgatcgccctttttaggccatagatctttgatctccggtaggatatctagtgagacaacaatctgcttatctggaagccctgtatccacgaagactcccaaatccttgcgcacttccgtgaccgttccccatccaaggctttcttgagttgctgtgacttcaagtgtcgtgagtcggagcttctgcttcatatctgtataggcaaagcccttgacactttctccgacttgatgggggccttctgctttatcaagcgcgtaggtttggccatctttttgaacaaaatagaagtgatcattttcatcaatgaccattcccatgatgtagcttgctagattcgtattcatgtttccttctttcctcttgcctcttcacaagaataatggaaataaaacccagccagcagtgccaactgagtctttctttcctataatggttgggatggattaaacttccatcaattctttttctttatgagctgtcatttcatctacatgcttaacagcgtcatccgtaactttttggatctctttttcaagacctttcaattcatcttctgtgatttcttttgctttttcttgtttcttcgcttcatccatagcatcacgacggatgttacggatcgctactttagcattttcacccacttttttcacttcttttgccaagtcacgacgagtttcttctgtcaaagctgggataaccaagcggataacagatccatcgttggctggagtgatgccaaggtcagaagcattgatgctgtgctcgatgtctttcaaagatgatttatcgaatggtgtgatcaacaagacacgcgcttctggaatggtgatagatgccaattggttcaatggtgtctctactccgtagtattctacgaaaatacgatccaaaagacttgcgtttgcacgtccagcacggatgctaccaaattcacgtcccaaactttggtgagactgggtcattctttcttttgctttttctacgattgggtttgccataatcttcctctattttctattatttttctacgttattcgatacggttgtaccgatattttcaccaaagacaacgcgtttgatattgcctggttcattcatattaaagacaaccaagtcaatgtcgttgtccatggagagagtagaggctgttgagtccatgatacgaagacctttgttgatcacatcacggtgagtcaattcctcaaatttcacagctgaagcatcttttttcggatcggcattgtaaacaccatcgaccccatttttggccatgagaatggcatctgcttcaatctcagctgcacgaagggctgcagttgtatctgttgagaagtaaggagaaccgatccctgcaccaaagatcacgatccgatctttttcaaggtgacgaagggcacgaccacggatatatggttctgcaacttgttgcatggcaatcgctgtttgaacacgtgtatccacgccaacttgttgaagcgaatcagccatcacaagagcgttcatgacagtaccgagcatacctgtgtagtctgcttggacacgatccatccctgcttcagcagcaggttctccacgccaaaggtttccccctccaatcaccaaggcaatttcaattccaagttcatgaacttccttgatttcttgggccatattttggacagttttgatatcgattccgacaccacgttcgccggcaagagcctcaccagatagcttgattaagatacgtttatacttaggttctaccattttctctctccttttttgatctgtattattttaccataaattacgctttttatatagtcatatccatcaaaattttcttttttccatccgattagttttaccaactgtagcaaataaaaattgagtacaaaaaaagctacccgaaggcagcttttcatttcaattaaagtgagttaacatccactttgataccaggaccttgagttgtagtcaaagtcaagctagttacgtaagtacctttagctgtagctggttttgctttttggattgtgtcgttgaaagctttaaagttttcaaccaatttagtatcatcgaatgaaactttaccgatgatcgcttgaacgatacctgctttatcagcacggtaagtgattttaccacctttagactcttcaactgctttcgcaacatccattgttactgtaccagttttagggtttggcatcaagttacgtggtccaaggacacgtccaagacgtccaacaagagccatcatatcaggtgtagcgataacaacgtcgaagtccaaccaaccatcgttgattttcgcaacaaggtcatcttcacctacgaagtctgcaccagcagcttttgcttcttcagcttttgcaccacgtgcaaatacaagtacgcgagctgttttaccagttccgtttggcaataccattgcaccacggatttgttggtcagcttttttcacgtcgatgttcaagttgtaagcaacttctacagttgcgtcaaattttgcaaagttagtttcttttgcaagagctacagcttcttctacgctgtatacttttgtgctgtcgattttttcaagagcagcacgaagttgtttgctttttttagccattttatctttctccttgtaatgtggtcatatcgattttcatctcccacgtcactcgtcatttgatcaagtgtattgcgggcaaataggattgttacaattagtcagtaacagtgaatcccatagaacgagcagtaccttcgatcatacgcattgcagactcaatgtttgcagcgttcaaatctggcatcttagtttcagcgatttgttgtacttgtgcacgagttacagttgcaactttcgttttgttcggtgtacctgaacctttttcaacacctgcagcttttttcaaaagaacagcagctggtggtgtttttgtaacgaaatcgaatgatttgtcttcataaacagtgataacaactgggatgatcataccagcttgatcagctgtacgagcgttaaactctttagtgaatcccatgatgttgatacctgcttgaccaagcgctggaccaaccggtggagctggagtagctttaccagcagggatttgcaattttacaagtttttcgacttttttagccatttcttaaatcctcctttgtggttttggcggtaattacagatttttacctcccacaagtatgctttgtgcatacctttctattatacacgatttctctttttttgcaagaaaaaattaaaatatagtaaacttttttttcgttttatgatagaatgaagctatgttaatcaaagttgcttctgtattatttatttttttaacgctgattctgagcggcatcattgttcacctctttaaactccaaaaaagaggatggcgatccaccgatattgcctttcctttatttgccttggagtactacctgatttcagacagtgccttttaccacagcctcttaccactgctagccttgagcctttcgcttttggccttggggctaacggtttatttcttaaaaaagaaaaagagtttttattatccgaaatttatcaaatacttctggcgcgctggttttctgatcaccttcttgctctatctgatcctaaccgttagtttatttatctaatattgaaaaagataccatcttgcttcatttcaaggtggtatctttttttgaccaactacgacgattcgaatgaactaggaagtatttgcctttgtcaatgattcatttttataattttatgatcgacaatctgataaatagcatcgtaatcttctttctggtatttatgagctatttctatcaaggtacacttttgttgagacaatatttttcgaatctctcttgcatttgtttcatccaatgctgctgtcacctcatcggctaataaaatgggttttggtcggagaatacaccgtgcaatttctaatttcatcatttgtcctccagataaattctgtggatctatttgatactctaaatcaccagctaattcgtcccaaagatgaacagattctaaagctttttgaagttggtcgtctgaaaactcctgaaatagagtcaaattttcttttacagtccccttaaatagataaggtttttgatgaatgagattgaccctgtcgtaagaaggataacaagattttccttttctatctatcaattcaatacttccactatatttcttatcttctccacataataagtgaaacagggaagttttaccactgccactggcacccgtgagaagtactttctgacaagcagcaattgtcaggtttgtatttctaaagatcaaatgatctccaaatgtcttcgttaaatcatcgatctgaatactgagcttttctgtcaaaggttctaaaatggttgtcgtctcattcacttcaggcattttcaaaatcgatacaactttctttttgacaaccgttgatccttgcaaattagatgtcatttctaataattgttgcaaaggggagattaaattcatagaagccgtcatcatggcgatgagtgttgtcagtgacaaggtcgtagaaggaagaagcaataaacccgttaacaaggggccaatcaatcctaatccttttaagggacccgtccaaaacatgactaaattgtgagtcgtatagtaggtatattgttgatgctccgtttcactaatttctttcagaacatgctgtgaaaattctgttcccgcttgattgctttggatggtttggattcctttgctgaaatcggtgatactggataaacttttctttcttgccttacttagctcttccccacgtttttgtaggagtttgttaaatacaaactgaggaatgatcatcaagaagccacctattgtaaagagacaacctataaaaaagttctgcatgatgagatagactatagatgctagaatggataagccaaatactggataaatgagcataggagtcaaaaattcttgccaaaacatcggaatatcctgtgttaaaaatgagtttaactccgcctctgtatactctaatttttttagatgaaagtaggttaacgttctctccgaaatcaatatattgaattctttgatgatcgatcgaactagaagattatcgatatacatacaagcatagatcaatacaaatagagcaattcctcctataccaaagacaagtaaagctcccttatctcgcggattaatttcacctgcaaactgaataataaacgataacaaaagcccttgaagtgagtacaaaacagcaaatagaacatacaacatcaatttccatttagataaattttttaaaattatttgcatcttttttctcctttccctttttatagatatagtatataatataaaaaaatagtatataaaaaattacggaaatccgaacaaatggacattagagaaaaatttaaattgattcgaaaacaaagaaaaatctccttaagagaacttgggaatatcgctggttctgcttcgagtatttctgattttgaaaatggaaaaaccaatctatccaatgatatattgcttcaattattggggtacatgattgtggagattaatgagatctttgattggagtgatttccatagtgctgagtttttaaccttgaaaaaacgaatggacgaggcaatggaaaactcggattgggtatctcttcttcaaattaaaaatgattttcaagaattagcaatctcaaagcatcaatacatttatcacatcctctccctcgttttagagattatcattgcagaaaaacaacacaaaaccgtttcacagcaggcaataaatgaactgacggattactttttttcattagattattggaccaatcttgacattgggttaatgggaagtgtggtctcctatttcacaactgaagctattgttctctttacggatacaattttggaaaatacaccagacaaacttaaaaacaatctggaccgaatcaaaatcgatacgattttaaatttagtatctgtcttaatcagtagaaaagaaaaaagtgctagcaaacaactgctaacacttctatttgcaaaacaattccctagctattttgcatttcaaaaattatacttactagaattaaaggccatctatcaaagcatttgggaagatccaaagcaagggagatctctccatgatgatgttatccattcggtttcattgttactttcaaaagctcaagcacaagagtgggatgcctatttcatagaactaactgaacagtaaaaatatcgtcatccaatcgaaactattttatctgttttgctcttttcttttatttcttccgatgaaagaaccagcccaccaacttcttgaaaacttgaatcaagatgagagaaagaacggccatgatggcgcagataagcagcgtttgaagtctcaaggggctcatgttaaagaatctacctaggatactacttgaaaccaggaaagctaggatatttcctagaagaaccagtctcttgtagtgattgagaggctgggattcttggtagatgatggtaaatccaacaaaggccatcaagcagatggctgcactcgagagttcttctgacctcatgccaaatgttgaagagagcaataccagactgaagatcagtataaaatccgtcaaggcagcaggtagcgcatttttaaagactgtttcgataaagcgccctttgatgcgctcgctattgggctcaagcgctaaaaagaatcctggaatcccaatcgtaaagccactgatcaaagacatctgcgacggcatgatgggataggtaaaggctaagagcgtcactgagatagccaacaaaatggaaaagatattcttgatcaaaaagagactggctgatcgttgaatattattgactacccgccgcccttctgccacgatggacggcatctttccaaagtcggaatctagcaagaccacttgcgccatctttttggtcgcatcatttccagattccatcgcaatactacaatccgctgttttgagggccagaatatcgttgacgccatctccggtcatggcgactttatgcccctttgcctgcaagccttcgacaaggcttttcttttgctctggtgtcacccgaccaaagaccgtatattggctcgctgcttggtgcaagtcttcttccgtcagtaagcttctggcatcgatcagattttctgctccttcaatgcctgctttttgtgcaatagctgagaccgtagctgggttgtcccctgaaatgaccttaatggtcactccttgttgtttaaagtaggcgaaggtttctttggcattttttctcaaaggattggagagaatgatccaggccaccaagtctacaggagcctctaaagtctctcccaggtgttctcccttatatttcccaaaggccaagacccgattgcctgcctgagtagcaggagctatctcttgttcaagctcagagaagccctctcgtaaaacaaattctggtgcccctaatacatagatcccagattcaaaggcaatggccccatattttttcttggacgtaaagggctgaatgtcgagagccttccatggctggctgactggtgtcttgtgaaattttcggatggcatccatggtatcgttttgatccatactagcctctacatactgagctagagtttccaagtcttgagcgtctttaactggacgaatctctgtcacttccatacctggctctgtaatagtccctgtcttatcgacacaaaggacatccacgcgcgataaggtctcaatccccttcatgctattgagcagaaccttttccttggctaatctgacagcccccagagccagtgccaaggtcatcaagagatacaagccttctggaatcatcccgatcaaggccccgactgttgaagtcacactgagcttgaggctatcgcctaggctgatatagctacgaagaaaaaggagcgagcctagcggaatgataaggagaccaatgatccccacgattcggttgaccgcatggaccatatcggactcctcatgagacttgacttgcttggcttccaagctcaattggttgatgtaggagtcgttcccaactttttccagtcgcgctaaaccttgaccagcgatcacaaaactacctgacatgagtgcgtcttgtgctccttttttgacctcatcggcttcaccggtcaattgcgactcatcgacttttagctcgccatccagcaaaaccccgtccgcatagatctgatctccagcttgaaagcgaaccaaatcaccctccaccagctgatcgataggtagagcgacttctttttcttcgcgaagaacgatcgcctcactcatatgtagaaattgcatctgacgcaagatacgtctagagcggacttcctgcacaattcctaccaaggagttgaccacgacgaccgggacaaacaagagattgttccaagacttcactgctaccagcaagaccgctaaaaccagaaaaatcagattaaagtaggtaaagacattgtctcgaatgatctgccctacacttttttctgtcttgatcgtgaccttattttgcttgccctcttggatcttttttgctacttcttcctgactgagtccttctaatctatccattgctttcctcactcatgtatttccaagggcaatccttctggatcaaagaaaaatgccatcttcttaccatcaaagtcatcatggcgaaggcctgtactctcaatacctagctgatccaatttagctagataggtctctacatcgtccactttaaaggccagatgacgcagtcccgcatgctcaggcaaggggaacttcggacgttctggggccgtcgatttgataaagagttctaaagtcagctggccctgacggagattgatcaagatatctccgcgttcgggacggtcatactcactgacaatcgcaaagcccaactggtccacataaaaatgcaacatagcatcgcgatcccgtccaatgatggcaatatgatgaatcgtgtctaacttcatctggtcctactttctattttctataaaaagaaaagggagtgggacaagcgccctttttccctatccttatgattgttgcaatacttttcgaggcttggtcccttcagctggtccaatcacacctgctgcttccaactcttccatgaggcgagtcgcccggttaaaaccaaccgataagcgacgctggatcatcgaagcactggctttttgggtctcgatgacgagcgctttggcctcttcaaagagaggatcaccctcgtctgagccacccatacctccatcaaagtctgactccgatacttctcctggatcaaaggcatcatcataatcggcttctgcctgctctttgacaaagttgacaatccgctccacatcgtcatctgagataaaggatccttgtagacggattggatgattttcatcaatcggtttaaagagcatgtctccgcgaccgagcaatttctctgctccattttcatccaagatggtccgtgagtcggtcccagatgataccgcaaaagcgacacgggaaggcacattggccttgatcaaacctgagataacgtcaaccgatggccgttgggtcgcgagaatcatgtggatccccgctgcacgcgccttttgtccaaggcggataatggcatcttccacttctttacttgcgaccatcatcaagtctgccaactcatcgacaatgaccacgatcaatggaaggggtacttgcttcatctcagactgggcattgtactcagccaccttggcattaaagccagcaatattgcgagcacccactttcgagaagagctcatagcgattttccatctcatcaacgaccttctgcagagctcgactggccttgcgtgggttggtcaccactggaatcaagaggtgaggaatatcattgtagacagaaagctccaccatctttggatcgaccatcataaacttgacttcgtccggacgggccttcatcaagatactcgaaataatcccattaaccgctactgacttaccagatccagtagaacccgctaccaagaggtggggcatccgagccaaatcaaaggtccgagctgaaccatctacggccttcccaagaggaatctcaaggagtttagctgggtctgtcttggactgctcccacaattcacggaaggaaacggtcgcaatctctgagttgggcacttcaatcccgaccagagacttccctggaatcggtgcttcaatccgcacatccttggctgctagggccaaagccaaatcatctgctagattggagatacggttgacccgcacaccgacagccggcttgacttcatatttggtaacagaaggaccgatttccgcccgctccactgtcgccttgatattgaaacttgcaaaggtttcttccaaaatgcggatattctgacgaacgatgtttttctctttggattgatttttcggcttatcaggtgcgaagagatcaatggttggaagcttgtactggaggagttccttaggtgtgaaatccacttgaacttcttccccatcgtcctcgaattcttcggcttccggaaactcttcgtatgcttcaggctcttcaggccattcttgatctggcaggtaaatctctggtgttgctggtgcgacaatttcggcttctgggaagggctctgtgaacggctcttccgccaacacctctcccgtttcagggtctacaggatgcccttccattgaaaggggagtttgaaaaactgcacttgcttcttcttgctttctttcagctgcagcagcttcctcggcagctctcgcttctttttcaaggaatttctgctcgcgacgctctttgcgtttctccatagaagcgtggaaggcttccgatcccttttcaaacaaatcatagatggagtaaggactcatcaagagaatccccaatccaataaagagaaggccaataaaataagaaccaatatttgaaaacaggaaggaaatcggagcataaagaagggcaccgatcataccaccaccggcaaagctctccactcgcagatgaatcaggtctgccatgattcttgaaaaggtgaccttgatcccattattgtctaaatgaagggaggatacaaagaaggcctgaaacatcaagagaagcccagcaaagaagcttaggaatcctgaaatcaccccttcgtgtttgtccagccatttaaaggcatagaggtagaaaaaggtcgctaaaatagccaagtaagccaaactcccaacaaagagtcggatcaagttgtaggccaagacccctactgctcccaatttcaaggtcgcaaaaactaaaaccagactaatcagaatggtcacaatcatgcgatgaatcgctttttttctttctaattctgctttggacagtcgtctcgtcgaccgtgttttttttgattgattattgtttgccataacctttattatatcacatttccaagccagttctctagtaaaatcactttcacaaatttgtagcagaaagcagaaaaacagcaccgagtgggcactgttctttagagctgtttagaacgatattcaatgatgttcaaattccaaaatggatcttattcagattttttatcctccggtgtgatggtatctagaacttgatcgaccttttgctctctttccaattcgttatccatttgaattatatcgatttgatcttgtacatttgtctgctggacttgtggtttgaatgacgaagcaaatcctactccaatcaccaatagacccgctccaagaacgcaaagtcttttaacatgccaagccatcggcaagggaatcttcgctcggatccccgatttcttgacccaatccggatggtctcgcatcacacgatttgctgccatcagaggcatcaggtagccaaagagcgcaatgaccgtggtcaaaccaataactcgaaaacgattctgattggaaggagaaacatggttcacttccatcaagaccattcccacaatcactaaaataatgactagtaatagtcccaaagatctccatagaccttccctgcggtaacatttcaattcatcaaacgacatctcgttaaaattcttattcattttttaataattccttgtgtttgttcaggctctttcaattaatctctattttgattggaggatttacagatgactgccttcatccttcaagtattgcttagcctttcgaacgatatagagcaactcatcttctgagactaacttgcgaaagagatcattggctctgtgctgatcgcctttaagagtagcattcaaggcttggtagtagataatttccaactgctggtacttgaaatcattgcttaaatcttcgaaatagtcattactttggtgcgcaatggttaaatcataaagggcaagacagacctttcttgttttctcagccagtgtcgggtctgtgatagtcaattcattcaacctaccctccagttctcctctagacaaatcaggatctgtcaggacagttgatcgcatgagataactttcaaaaaagtttttatatttctgcggataatccgtccgactaagtgcttccctagcttcttttatgacagtatcaaaatctcccatcataaaagaataggcaaccgatgtcagcttaatatctatctgtgaaatagcttttttcacattcttgttcaactgaaggtattgctgccaaaaagctaaatctaagtctacacggagcaaggtgttgcacttgttggtgtagcttttcttgagcaattggatgaataaaatcaagcatgcaataaccaataaaacgccagcagtctgaagaagattatccctgaccactaatccaatgcaaaagatcagaagcattgctaacaagcctgcagatctaatatagagtctatagtttttgcgtagagttttataatccaatttgtagcctcctattcatgatacggtttttgagggaattcgttcattttcaaacaaattaacatatctcccatcataccgaattttccatctatacgcaacttccttcttaattagtgatttatcaaatgttatcggtcttgaaacaacctcagaaaatagagaatcccgtccagatttgaaagtatcgcaaaattaaggtacaatagaaaaagacaactatgttggaaaggaagaatatgaaaaaattaatcgcactactattattttccggcttggctttgacagcttgttcgtctaataagactgacgctaactcttcaagctcaagcaaagaaaagacagagcagacagcaacttctagctctagtgaaaaagatcaaaagaaaattgaagaagaacaaaaaaaattagaacaactgcgcaaagattttaacgatgccatgaccaatgaaaatgctgtcttcccacaactctcaactgatgtggctgaagacgaagcagaggttaaaatcacgacaactgaaggcgacatcactgtgaagctcttccctaaatatgcgccccttgcagttgaaaacttcttgacccacgcaaaagaaggctactacaatggcttactcttccaccgtgttattaacaactttatgatccaaactggggatcctaagggagacggtacgggtggcgagtccatctggaagggcaaagacaaatccaaagattcaggtactggttttgagaatgagtattctccatacctttacaaccttcgtggagcccttgccatggccaattctggtccaaataccaatggtagtcaattctatatcaaccaaaataaggatgatatttctagcaagctcccgactgaccgcttcccagctaagatcatcgatgcttataaaaatggtggaaatccaacccttgatggtggcaactacactgtctttggacaagtcatcgatggcatggatgtggtcgataaaattgcgtctgccgaaactgatgataaggacaaaccaaaaatagacatcaagattgaaaaaatcgagatcttaaaagactataatttcaagaaataatgaaaagagaaccaaacggttctctttttctatcaaatgtaaatttttcttagaaactttccttaggtgagtacggacgtcagcgaacttctgcgaagttccatgactaattattgagcctaaggtctcaataattccgtgtgcctgaaacaaatctgtttcaggcacttttctcactgcggaatgtttcggtcattacttgactaaatttaaaaatagaatcatttagattttttgaattagttatgccgctttatgtaaacaacaaaatttcttcattctaaaaagcgagacaagtttctctctttgtctttacgtcaattcattaaagtcccagatttgatccatccagccttcatagaagtctggctcgtggcaaaccatgagaatcgatcccttgtactctttcagagcccgtttcaattcatctttggcatccacatccaagtggttggttggttcgtctagtaccaagacattgttttcacggttcatcaagagacagaagcgtaccttagcttgctccccaccggataacacctggatttggctctcgatgtgtttggtcgtcaagccacagcgggcaagggcggcacggacttctgcttggttgagagccggaaaggcattccagactgcttctagtggtgtttgacgattgccaccttcgacctcttgctcgaagtaaccaagctctaggtaatctccacgctcgacttctccagcgattggtgggatgattcccagcaagctcttcaagagagtggttttcccgatcccgttggctccgatgatggctaccttttgattgcgttcaaacgttaggttcaaaggcttggtcaaaggacgatcatagccaatctgaagatccttagcctggaagataaagcgtccaggagtccgagcatttttaaattcaaaggatggctttggtttctcgctttgcaactcaatgagttccatcttgtccagcttcttctgacgagacatggccatattccgtgtagccacacgcgccttattgcgggctacgaaatctttcaaatcagcaatctctttttgctggcgctcataagccgcttccaattgcgatttcttcatttcatagacttcaaggaattggtagtagtctccggaatagcgggttaactgctgattttccacatggtagacgatattgatcacatcgttcaagaatggaatgtcgtgggaaatgaggacaaaggcattttcatagttctgcaagtagcgtttgagccaatcgatgtgctctgcatccaagtagttggttggctcatccaagagaaggatatctggtttttcaaggagcaatttagccaaaaggaccttggtccgctgcccacctgaaagggccgtcacatccgtctccatgccaaagtccatgaccccaagagcccgggctacttcatcaatcttggcatccaaggtataaaaatcacggctttctagacgctcttgaagttctcctacttcttccatcagagcatcgacatcggctccctcttccgccatggccatatagaggtcattgatgcgagcttcagctgtgaacaactcatcaaaagcggtccgtaagacatcgcgaaccgtttgtccttcttctaagaccgaatgctgatccaggtaacctgccgtcacatacttagaccactccacctttccttcgtcaggttgcattttaccagtcacaatgctcatgaaggtcgatttcccttcaccattggccccgacaagaccgatatgctctccctttagcaaacggaaggacacatcctcaaaaatcgcacgatccccaaaaccgtgactcaaatttttcacttctaaaatactcatgcttgactctctttcattgatttcactcgtatgattatatcatcttcactacaaaatgaaaagggagcccaactcccttttcttttacaaacccaagtctgcgtaaggtttccggtagccaacttgaacaacttttccgtctttgacaagcagaggccgcttgattagcataccgtctgaagcaaggagatccgccgcttctttcactgtcagttgatccaccttatctttcaaaccgagttcccggtatttcattccgctagtattaaagaaagacttgatcggtaggccagacgctgccatccagtcttgcaattctttgctagtaggtgtttctgtgacaatattttggctttgaaagtcacattggagaccgtccaattctgatttagcctttcgacaagtcgaacattttgggtattcaataaaggtatacatcgattttatttctccttccaggtaattccttcatggtgtaagagccagcgtttgcgatcgagtccagacgcatagcccgtcagttgtccatcttttcccatcacacggtggcaaggaactaagatcgtcaagggattgcgtccgacagcctgtcccacggcttgggctgaaccacaagaaagatcctgggcaagctggccataggttttggtctcaccatatgggatctctcgcaataactgccacacccgctcttgaaaagctgtcccttgcggtgctagtggaaagctgatagcgattggatctcccgcaaaatagtggtccaaccactccttcaccttctcatggtagggatggacctgctccagcgccccatagagatcaggcgcatcttctttcggatcataaaaatcaagctctacaaggccttcttcactgacaacgatcgaaagaagccccatagggctttcataaaattgtttaagatagagagtcattgtaggctgcttccgctctttggtcccagcggtcctcttctgagaccacttggaatagactagtttctgcttttcgtttgatcttttgataagccagacgaactccatcaatagggacctttccacaataatggtagcccaatttttcaagcaaatgttgcatgactagattatctgggtgcgtatcgcaacggaaatccggtcctttttccccttcgattaaaccttgaaggaaggtctgagccacccctttgccagcagcttctttggctacagcgacgcggtgaaaagtgacatacatatagttgtcatgctcccacttgccatcgtaaatctcattataggccgcttcatttcccttgtggacggctgcataggcgacaacttcctgatcttcaactgccacatagccacgactttctagaatatcctcaaaaataatctcttcatctggatagccatcctgccactggtcaacctgtctttgagccaggctttccttggcgtcttggatgatttccataattcgcttaatctcgttgggataagccattctaatttccatcctgctttcaacctttcctagtcttgatggtaacgagcatagagctcactcttttgcaggccgtattgttttgcgacctgtttaattgcttgatttttcttcatgccctcttggaccaaggtatcgatctcttggatcaagtcgacctcttctaggtctagctcttcttccttggctccttcgacgatcaagaggcactcccctttgagaggattttcttcaagaaatgcgactaactcagaaatactgccgcgagtatattcctcgtagatcttggttaattcacgaaccaggacgaccgaacgatccccatagacagccaacatattctctaaggttgccttcacccgatgaggcgactcataaaagatctgagtctctggataggccactttttcttggaaaaaggccttctgttgcccctcttttcgaggcagaaatccataaaaaatatgaggttgaggggctaggccactggcaatcaaacccgttataccggcactagggccaggcacagctacgacaggaatctctcgttcaatcgctgccttgaccaaatcatgaccggggtcagagatactagggagtcctgcatctgagacttgcgctaagtcttttccagattctaaatgggcgatcagatctggaattttttccatggcattgtgctcatgaaagctagtctggggcgtcgcaatctcaaaatgcttgagcaagaggcctgtatttctagtgtcctcagctgcgatcaagtccacatcctttaaggtctggaccatgcggtaactcatatcctcacggttaccgatcggtgttgggaccaggtaaagcaccccagttttcttttcctctttaaaacttcgttggatctgcatgcttactccctaaataacaactcgtcacaaaacatacactcttcatcgttctcacggcgttgaccgtaggaataagtgcaaatatgaaaaccatcattgtaaatacgttgcaaattttcacgaccatggtgttgggactttgcggatgaagtcttctcaacttcccccaaacgctctctcaatttatcattttctaagcgaagagctgtattttcttcgatgacttgtttcaaatttttcttgatggcttcgacttcagccaaggtgaccaacaaattctgagaaaagccgtctaaagcatcaaataattcttttttattcattctgactccttaactttctaagctcaaaaccatatattctagagcattttgaaaagaaacattggccttccacatcctgcgagcaagactcaatttctcaagcaactgctgggatctactcaaacgcaactgctcttctaaagccaactccatcaaacgaaaggcttggctttgtttttccttatcatctgctaggctcactaagcgggtcacttccaaataagcacgattcaaattggattgacaccgttcgatgaactgatcacaaacttttgctagttcaaaaaacgtagcattctttttttgttgctctgcttcttcgagactaaaactaaaacgagctactaaatttgcctgtgacttgatcaagccttctttttctagcagttcggttaggtaggcttgctttttaggaaaatggacctgctgggcccgactcttgatagtcggtaagatcaagttttcatcggatgtcaacaagaagagatagatctcactctggggttcttccatgacttttaagagagagttggccgcattggtatgcatcttatccgcatcttggacgataaagacctggcgactgccttcaaatcctgattgagaaaagtcttgaacgagcgagcgaatacggtcagtcttaatgatctggttgactggacgcacgatctttacgtctgagaattcttcttcttcaatcaagcggcaggaacggcatttgccacaaggccagactccctgcaagtcttcgcaaaattgactttgagctagcaagagggccatctcaaaactggcaaaagagcctgtaaaaagataagcatgactgagctgtttgtgttctaagatctgggtgaagcgctccaccaattctggctgaagctgttggatctcttctagcttcatttcaatatccccaagcgattttctaaaacagccaagacatccgcaaagactgcttcaaaggattgactggcatcgattttcacaatgcgctctggctccttttcatacaaggccaaataaccttgtctgactttttggtgaagctccaaaccttccaaatccaaacgattgacttcccgctcttggtttttcgcaattcgggcgagcccttcttcgacatccagatcaaagtaaagggtgagatctggtttaagaccatctgtcgcgaattgattgagccactcgatatcttccacactcagaccgcgaccatacccttgataagcgaccgagctatcaataaagcggtccatcaagacaaccttcccagctgcaagggctggcaagacacgttccaccaaatgctggcgacgactagcaatatagagcaacaactcggtcttggcatccatactagtatggtctggatctaaaatgacttggcggatcttttctgcaatgtctacaccgcctggttcacgggttgtaataaaaggaattcctttttcttcaagtagaggcaaaacggcttctaggaccgatgatttccccgctccttctggaccttcaaatgaaattaatgtaccgtttaccatagtatcctctttctagttttctactttttattttaccaaaaataagggtaaaaatcttgtattttaggagagaaaatttttcaaagtcattttcattttttcacttttttgttacaatgttcttataaagttttaggagacaacctatcatgtttaaatttaaagatattctggctatcatcttgggggccggcattttttcgtttgggatctattttttagtcattccctttcacttctatgaaggaggagcgacagggattaccttgatcacctattacctcctcaaaatccctgtatccctgatgaacttgctgatcaatatccctcttttcattctggcttggaaactgctgggcaagaaatctctttatctgagcttacttgggactttctcggtttcggcatggatggcaatttttgaagctatgcccctcagccaccactaccatcactttatttttacagcctttaaaggagatattctgcttgcctgtatcgcctcaggggttgtgcttggtttaggtctagggatcatcttcaatgctggaggaactactggaggaacagatatcctcgctcgaatctttaacaaatacacttccctcagtatggggaagctcatgttgattgtagatgccattgttctgacaactgtggtcattgtcttccaagatgtccgtaccgctatgtacaccctcttctttatcctgattgacacccttgtgatcgacttgattggagaaggtggttttgctggaaaaggcttccttatcgtcacatctaaaccagaagaaattgcccaaaaagtatccgacgatctgggtcgcgggattacctttatccgcgggatgggctattacagccgtaaggacctggatatcgtctactgtgtcgtttcacggaatgagatgaaacaaatgaaagacatcatcaatcagattgatccatttgcctttatcactatttctgaagcccatgaaattctcggcgaaggcttcactttagataaagaaaaacaacccattaaccgttaatagaaataaggctagattttcatctagctttttttctatttacgattttccttaggtgagtacggatgtcagcgaacttttacaaagttccatgactaaatcaagatacaatccgcgacccgtattcaattagttttgagccccttcgctttttaatttctaagctcaggctaaaacagttccccaaactgttttactctcaaaaattccgagagcatgaaacaagtatgtttcatgctcctttctcacggcggaaaatcttagaatacacgtcataattaataaaatcataattatttttacagaatttattaagttactttatacaaaaatcagactggattgtcatccagcctgatttttttattaaatagcttttgcggttgttcgagtgatttcatcaactttcaaaccgttggcttcaaatttactacggattgtttctagatctgtcaccccatcaatttggacttcgataaccacacgatcgtctttggttgggatattgactgtattggcgatgttatacccctcttctacaatcaagtgaatgatttgttctagaacgccaaccttatcttctgtcacaaagcgaacacgaactccttcttctccatagcccgatacttcaaggaaggcacggaaaatatcacggtctgtgatgacaccagatacttggtcattgtccacgactggaagaattcccaccttgttcttatacatgaggtaggtcgcatcttctaagctcgcaaatttagagacggtaatgacatcgcgaagcatgacatctttgaccttggtcttgttcaacagatagttcatctcgaaaattgacaaacttgttgctttagatggacttgcttctgcaatcgtaccttctgtcactaaaccaaccaatttatcattttcaatgactggcaaacggtgcaaaccttgttcgcgcatcaaatctgccgcatgggcaattgtagtatctggactaatgtaaaccactttacgtgtcataaaatctttaacagccataacaagttctcctatgcttttattagttttattatacttgattttaagaatgatttcaaacgctttcagctgttttctcttgttttcaaaatttagaaaaatcaaacaagagggatgaaaaaagaaaggtcttcaagacctttctttttaatattctagtgaactttagaaatcttacccacccaaataagccttgcggacttcttctgaagctaagagttcttttcctgttccggtaagaacgactttccctgtttccaaaacataaccgcggtctgcgatggcaagggccttgttggcattttgctcgatcaagagaacagttgtcccttgtttttggatatcttggatgatatcaaagatttcttggataaagattggggctaatcccatagaaggttcatccagaagcaagagttttggcgtcgacataagtgcacgacccattgcaagcatttgttgttccccaccagatagggttgctgcatcttggttcttccgttcttccaaacgcgggaaacgagaaaagactttcttcaagttagcttgattttcttctcgatcttttttcaagaaagctcccatttccaagttttccataacagtcaagcccggaaagacatgacggccttctggaacttgagagagtcctgctgctacaatcttttgagccggaaccttttgaatctcctgacctaaaaactcgattttcccagcacttggacgcaccaaacctgaaatggtacgaagaatagatgttttcccagcaccgttagcaccgataagagaaacaacttccccttcgtttacctcgaaactgacatcacggacagcctggatcatgccatagtgtacagaaagattttcaacttttaacatagacattaggcttcacctcctagataggcttcgattacacgtttgttggtcttgatttcatctggcgtaccatgggcaatcaagcgaccatattccaatacataaatccgttccgttacttccatgaccaaactcatatcgtgctcgatcagcatgatcgtaatattaaattctttttgaatgcgacggatcaattgggtcaattctgctgtttcttgagggttcatccctgcagcaggttcatccaagaagaggatttttggctctgtagcaagggcacgaacgatctccaagtgacgttgttgtccgtaagctaagtttttggccaaggtatctgcttcgttttccaaaccaaaaatcgctaacaattcaagagctttcgctttcaaagcttcttcattcttgtaatagcttggcaagcggaaaagactcgcaaagacatgtggtttgtggtgattggcaaaggcaatcaagacattatccaaaacgctcaaatctttaaagagacgaatattttggaaagtccgtcccaaaccacctgcagcgattttataaggtgctttaccatttaggagctgaccgtctaaggtaatggtcccttcacttggttcatatacccctgttaggaggttgaagagggttgttttaccagcaccgttgggtccgatcaacccaaccaattccccttcattgagttccatggtcacatccccaacggctgtcaaaccaccaaagttttttgttaaattttttacttcaagaagtgccattagttagcctccttttttgagagtagttttttcaagctgaattcccatgttccaagaagaccacctggacggaagatcatcacgagaatcaaagccaatgagtaaatgatcatacgtacacttgagaagtcttgaagtaccatgttcaagatacccaagacgatggctgccacaactgttcctgacattgatcccaaaccaccaaacacgacaatgatcaagacattaatggtattggtgaaagagtaatctttaggaacaacagagccgataaagccggcttggagagatccagcaatcgccgctgtgatcgcgccaaatacaaaggcgatgactttgactttggtcgtattgatcccaacagattctgctgcgatttcatcttcacgaacagaaagggtagagcgtccaattggactgcgtaagaagttaatcgtaaagatcgttgtaatgacaacaaagaggtaaaccagttgccaagttgtaaaggctggcaaaccaaggataccagcagcaccatttgttagggtaccaccattgacgatcaagatccggatgatttcagaaaccccaagtgtcgcaatcgcgaggtaatcccctttcaaacgaagggttggaaccccaacgatcaaggcaacgacaccagcaatcaaagcacctaaaaccatcgcaccaaagaaagccccataggttggtgatttggaaccgagaatggctgcagagtaggcaccaatcgccataaatccggcatgcccgagtgagaattgacctgagaaaccaacgatgaggttcaagccaactgcaaggataatattaattccgatttgttctaaaatttggatatagaagaggttgagcacacccgctgcaaccaagacttggatcaaggcaaaacctgcgaccaaaagaccaagccagactaaattcacttttaaattttgtttcatggcttacaccttctctttcacatttttaccgaggatacctgctggacggatgagcaagatcacaatcaagatggcatacacaatggcatcacggaagtctgaaagaccgatcgctgtagcgaaagtttccaacaaaccgataacaaatccacctagggcagcgcctggaatgattccgattcctccaagaacggctgcgacaaaggctttgatccctggtgtcatccccatcaaaggctcgatcgagttgtaatacaaaccaatcaagacaccaccagcacctgccaaggctgatcccaaagcaaaggtaaagctgatcgtacggtttacgttgatccccatcaattgagcggcatcactatcgacagatacagcccgcatggctttccccatctttgtcttttgaataataaattgaagagcgaccatcaagaaaacagacactcccaagatcatcaactgaatattggagattgaaataggaccgaagttgtaacgaaccgttttaatcacttgcgggaaggaacgggtattggcccctacgaagaagaccatcccatattcgagcaagaaggaaaccccgatggctgtgatcaaggctgcaatccgagtcgaatgacgaagcggacgataagccaggtattcaattacaacccctaaaatagccgtcccaaccatggctaggagcaaggctacaaagaagttcactttccatgagttcaataagaaatatcccataaaggcacctaccatgtagatatccccatgggcaaagttgatcaatttgataattccatacaccatggtataaccaagggccaagagtgcatagacacttcccaagattagaccgttcactaattgctggagcatttgaaccatcctttctaacaataaagagcgaggccaggaattttcattctcccagcctcttgtacaaacaacaaatgataattatggtttaacagactcaacagatttgactttaccatctttcaagccaatcataagagctgatttaaccgggttgtggttcttgtcaattgacattgtaccagtcacaccttccaagtctttcaacttcgcaaggttatctttcaattcgacagagttcttagcacctttagatgcttctgcaaccatgtaaactgaatcataagccaaagctgcgaacattgaaggttcttcattgtatttcgctttgtaggcttctacgaatttcttggctttatcagtcatttcaccttcagtagagaatccagctacgtagtagatatctgtagctgcagcaggtgttgcttgttcaacaaatttagcatcgctaaatccatccccaccaatgattggttgtttgattcccataccacgcgcttggtttacgatcttaccagtttctgtgtagtaacctggaagaacaatcgcatcgaagtctttatctttgatttttgtaagagcagcttggaagtctgtatccttagattggaaggtttcagttgctacgatttcacctttataagatttcttgaaggcttcagcaatccctttcgcatagtcagatgagttatcgtagtaaagaacgactttcttcgctttcaagttatcagttgtgtatttggcaatgatttttccttggaagctatcgatgaaggttgcacggaaaaggtaatcttgaccttttgtcaaatcatcttgagttgctgatggtgtaaccaatggcacacctgctttaccagcattggcaaccgctgctgcagtagcccctgaagttgcaggtcctacaagagcgttcacttttgattgagtgacaaggtttgtagtgactgtagctgcttcagctgtttcagatttgttatctttatctgtgacaacgatcttcttaccgtcagctccacccttagcgttgatttcatcaacggccaattgagcacctttttgttcagcactaccgtaggctgctacttcaccagttttttcaaagttaaaaccgacttttagttccttgccgatttcgttaccagttgtgtttgaacctgaagtagaaacttcaccacaagcagcaagaagagcgacacttgcaatggttaaaaatgaaagagcaaattttttcttcatttgtaatgatctccttaaatgaatcttaaaataaatacattaagaatataccgaattatctgacaattgtcaataaaaaaaacgcaatccatcaaatgattgcgttttctaaccttctgtgaccacagatggggcctccaatcgttgcaaactccccacaaaatctgtatctaaatctttgagatggcaaggcaagacctttttgacataacgttctttctttaagtcttccatgacttgatcggccttgtcactgtccacatacaattggacataacggcatttcttagaatggtacaagacatctccgacagattgtaattttttcccatctcgattgtaatacaatttaacaattaagcctgttctttcttgtttctcaaacatggtcaatccctttctcgttctgttactagtatatcaaatttcaagaaaaagaactactcttttatgagagcaaaaaaagagagtgggacagaaatcggtcattcgttagaattcgatttcgtcgtcccacctccgcacagttgagtagggctgtaaaagctgatgaaatcagcgtagtagagcccactcaaccactgcgttttgctcgacaatccaaaaataattgagaggctaggacttttgtcccagcctcttgacggaccttcccataggatggtttagtccaatttattattggccatgatttcatcaataaagccatattcaagcgtttcttgtgcactcatccaattatctcgctccgcatcagcatgcactttttcaatggattgacctgaattttccgcaaggattttttccaagttattccgtgttttgagcaagtgttctgctgcaatcgccatatcggtttgttgggtaccaccaccagtaccacccattggttggtgaatcatatactcagcgtttggcaacatgaagcgtttgcccttcgcaccgcttgaagcgatgatagttcccatagaagcggccatccccatgacaatagtttggacatctgacttgataaagttcatggtatctacgatggcaagacctgcagagacagagcctcctggtgtattgatatacatatagatatcttttgtattatcttgggcatccaagaagagcaattgagcgataatggagttagccatttggtcctcaactggtcctgttaccatgataattcgatctttcaacagacgggaataaatatcgtaagaacgttctccacgactggtttgttcaataactactggaatcatctattcttctcctttagtatccattcattctcacgattcgtgaggttcaaagtatatgtgctattataaaccaatggtcaaaaaaggtcaaatcttaagcacctttcggacttatcttataatgaatggtttcttatttggtaccgaataaacggtcacctgcatctccaagaccaggaacaatgtagccatgttcattcaaatgatcatcgagggctgctgtaaagatatcaacatctgggtgagcttcttgaagagcttttaccccttctggcgctgatactagacagacatatttgatatggctagcgccacgttttttcaaggaatcaatagctagaatagcggatccacccgtagcaagcattgggtctactacaaagatacgacgttgatcaatatcttctggcaatttcaccaagtattcaactggtttcaaggtttcttcatcacggtacatcccgatatggccaaccttagcagctggtaccaaactcaagagaccatcaaccatcccaatccctgcacgaagaattgggacaatagccaacttcttccctgcgatttgtttttgaacggttttggtaataggagtttcaatttcaacatcctcaagaggcaattcacgcaacacttcgtagcccatcaacatagcaatctcatctaccaattcacgaaaggccttcgtagaggtatctgtacgacgaagaatagacaatttgtgttgaatcagtggatgtgtaataacttctaattttcccattttgagatccttctttctaagctgttattattcaaaaaagagctatgataaaagtggagtcaagctctactctttctttcagtccctctttgatactcacagcacatggaaatcttcatttccaactttacattcttcttattataccaaattttacaaaaaaaagagagcccttacacttaattttttaagttcggactcactctttctatcaatcaattacaaccattctttgtatttcttaatatagatacgtttgacaaccgtcacactcagcatataaaggacgataatagcaaacaatagaacaaagtacaatccatttagttggctcaacttcaagatagaagccaaaggactatatggaagggaggttacaaagaaggctgctgctagggtcgtcaccacgactgagaaggctggacgactttggataaatggaagttttggtgaacgcaacatatggataaccatggtttgagaccacatagattcgataaaccatccagtttgaaacaccatgataaaggctgctgcatctgctgctccatggttgtagccatgacctaaaatcataggaacaacaaggaagtaaagaagcatgtaggtaataatatcaaatacagatgaaattggaccaatccaggccataaagcgcatgatagagtttgcttcccagatacgaggtttcttgaggaattccttgtcgacattgtcaaaaggaagggcgatacaagaaagatcatagataagattgagcacaatcaaatgaacgggagccattggaaggaaaggcaaaaagatgctggcaaagagaagagagaagatgttcccgaagttagaagagaccgtcatcttgatgtacttggtcatattggcatagaccttgcgaccttcaaccaaacctttttcaaggaccatcaagtccttatccagaaggatgacatctgccgtttccttggcgatatccacagcggtatccacggagatcccaacgtctgagaccttcatggatggagcatcgttgatcccatctcccatgtaacccaccttgtggccattgttcttgaggcagaggatgatccgcgctttttgatcgggtgataatttggcaaagaccgttgttgtttccacaacttgtgctaactcttggtctgtcatcgtatcgatttcgcttcccaaaagaatccgctctacatctagtcctactttttcacagacagcttgggtgaccttttcattgtccccagttaagatcttggtggttaccccatattctgcaagagctttgattgctggagctgcagaaggttttggtggatcaagaaaggcaaggtaaccggttaggatcatgtctcgttcatcttcaacactaaagatgtcattttcgtccaagtcggttttgtagctgacgcccaaaacacgaagaccttgttcatttaactgagcaacttcagcgaggacctcttgacggacttcatctgtcaggcgtttaatctcccccttgtactcaacataagtcgatacagaaagcatttcttccaaggcacccttggtcaccatgctgaccacaccgtcttcgtctttgacaatgacactcatgcgacgacgttcaaaatcaaagggtaattcatcaatcttatggaaggtttgatccagatcgcgaacaatctcatgtttcttggcttctttctgggtccgattgataatcgcccggtccatcaaattttttagcccggtttggaaataggaattcaagtaagcccggcgaaggactgatagatccaactcgccatggatatcaagcggatactccaaaacgatttcatcttgggtcaaggttcctgtcttatctgtacacaaaatatcgatagcgccgaggtcttggatggcattgagttttttgataacgactttttcttttgccatgatgatggagcccttagcaagactcgctgtaataatcatcggcagcatttccggagtcaaaccaaccccaacgctgagggcaaagacacccgcttctaaccagtcaccatctgtgagaccattgatcacaaagacaacgggcaccatcactaacatgagccgaatcaagagccaagagatggtattcatttctctctcaaatgaggttggttcgtcataggtgttgatggtttgctcaatagctcccatcatggtttcatcccccacgaccaggaccaaggctgttgcccgtccggagatgacattggttcccatgaaggccaagctttcactcgccaagagactatctaaattttgactctcagccttgctgagacaaatcttttcaacagcatcactttcccctgtaagaccagattgttggacaaagaagtcacgggaatcgatcaagaccacatctgctggaatcatatcgccggcactcagtttgatcacatctcctacgacgatttcatcgatcggaatttcttgttctgatccatcacgaagaacggtcgctgtattgacaatcatacgtgataagttgctagctgctttgtcgctccgcaattcttgaatgaagcggataccaccagagatcaggaccaaggtcacaatgatgatggaggtcgttggatcctgttcacctggttttgctagccagacattagtaatgaaggaaaccagcgcaatgactaacaaaatcactgtaaaaggattgatgatggattcgtagatctttttgatcatggaatcttcttgaccttttgtgatgacattttcgccataggcatcgcggttttcttctacttgatcgtcaactaaaccaagggcactggttttgtagttggcaaaggtgctttcaagtggttcttgaagagcagcaatgagtctttctttatttgtttgcattggtatctcctttttcaatcaggagccaatcacttttggagtccctacgacacaaatcagcgattggctggttcggtgcggttcgggatgatcgtcgatttgtatcatagctctctcctttctcttttcttggtaaggcataaaaaagagtcctaccctcgatcggtaggactcatgaaactcgtcatttatttttcaatcaaaactctcaaaaaactgaccgtccaagctttagctccacaaggcaatgaaatgagcttagtcttgacctttgcgatcaggactgttaaccaacgagtagtgtctccactgctttgcggtagtcatccgtatccttgtggtagcctcacctaccgtatttcgagtttattttactccttcactcacagaaagtcaacacttatttgtgaaaagtttccaccaagcgtttggtgatttcttcaatgagggtgaaaggggctgctacattgaggcgagcatgcaagtttccttcttttccaaaatctgttccacggttcaaaatcaatttggcttggtcatgaattttagcatgcagctcatcatcgctataaggataggctgaaaagtccaaccaaagaagataggtgccttggggtttcatgacacggattttggtcttttcatgcaattcatctaccacatagtcgatgtgtttttcaaaaacttgcttgagctctgtcaaccaaggtttaccatggcgataagccgcttctgttgcaatatagcccaagcctgaaatttcatgttgattattggccaattgccgttgtttaaaagccgtacgaagctttggattttcaatgaccacataggaattttttgttcctgcaatattgaaagtcttggttgcactggttaagatcaagctgaaatctttaaagcttggatcaaccgtgttaaagctggtatgacggtggccaaacaaggccaaatcttggtggatctcatctgaaacgagaaggacaccatgtttttgacagaggtggccgattttttccaagacttcacgatcccatacacggcctccaggattgtgcggattacacaaaacatagagtttcacctcttgctccacaatgtctttttccagatgatcaaaatcaatttggaaaagaccgtctttttcgactaacgaattttcgatcaattttcgacgattgagtttgacacttctggcaaatggaggatagaccggtgtattgattaagacagcatccccttccttagtaaaggcttgaatagctgttgaaatagccggaacaacgccttcgataaagacgacagcttccttgtcaaaggaatagccatgttcttctttttcccaatcaaggatagactggtagaggctatccgatgcataggtgtagccatagaccatttggtctgcatagccgataacagcttctcgtacttctggaatgacattaaaatccatgtccgcgatccaagctggaatgatttctggatctgtctcagtttctttccacttgtaggtatggtgggtcaagcgattcggtaaagtcgtgaaatcatatttggtcatcttaagcctccaatgcttgtttcaaatcttcaatcaaatcatccgcatcttcgattccgatggacaaacgaagaagatcatctgtcaaaccgtatgaatggcgaacttctgcaggaatgtccgcatgagtctgagtggtaggataagtgatcaagctttcaactccgccaaggctttctgcaaaggtaaagacttgaagggaattcaacaagttaggaatttttttctcatcttgaattttaaaggagaccattccaccttttccggtgtagaggacttctttgacctgaggggaggttttcaaaaactcgaccaccttgcgagcattctctgtggagcgctccatccgaatagaaagtgtcttgagaccacggatcaacagatagctgtcaaatggggaaagaacagcacctgtcgtattcaagttgtaaaagagtttgtcatacaagtcctcatcatttgtcacgacaacaccagccaagacatcgttgtgaccagctaggtacttagttgctgaatgaagaacaatatccgctccctcttcaatcggatgttgatagatcgggctatagaaggtattgtccaccacgactttggcaccttttgcatgggccaatttagctaaatgagcaatatcaaattccaacatcaatggattggttggtgtttcaatatagaggacatccaccggatcattatctagatggtggatcagttcttcttctgtattggcataggtgaaagagaaacgaccttcttgctcttgttggttaaaccagcggaaagaacctccataaaggtcacgaacggctaagacttttgaaccaacagggaaaatgctaaaagcaagcacgatggctgacattccagagcttgtcgccaaagcatagtctgcactttcgatagctgccaaagtcttctcagctgttgcgcgtgttggatttttcgtacgggtatagtcaaaacctgtagactgaccaaattctgggtgttggtaagtcgtagagaaatgcaaaggagtcgtcaaagctcccgttgctttatccgacttgattcctgcctgtgccaaaatcgtattgatattgcgttttttactcatattgccctccgataaacattcaatctaactgattactattttatcactattatgaggagagcggttttcccattttcaagacctagctatagtttcaaactataagaaaagagagtgggacagaaatcgttaattcgttagaattcgatttcgtcgtcccacctccgcacagttgagtagggctgtaaaagctgatgaaatcagcgtagtagagcccactcaaccactgcgtcttgctcgacaatccaaaaataattgagaggctgggcactttttacccaacctctgatttatttaatccgaaatttttgtctaagacgtgcagcttgacctccaataaagcggtcaaaataccgtagccataatcctaaggctccataaatagcaactcctaatccgcctatgacgatgatataaatcatgctcgatacacggccatttggtgggaaaatccagcccaaaatcaagcctgcgatcaagactccaagtagcatcactacagtcaggatagaaccaagcaaggtccgcttgaagatgatggttcgattaaactgagtaatggtttggatctcccgatacatgagaacgattggcaccattaaggcaatggtcgttgacaaaagcggcccataagaacgaaagaccaaaataaatggaatttgtaggaccaatttcaccactacaccataaaagaagtagcggatggccttgcgattttgaaagagggcttgaatcattggcgataagaccgtgtaaagaccgagaattaccgtctgcaacatcgctacgatgaagagtcctaaggccaagctatctggttgcccatagaaaaccgtataaagtggttttgcgactgctactgcaccaaaggtggctggaagcaagaaagctagcaacatggtcaagttatcctgtacgagcttcccagctgcttttaggtcccccttcacataattctctgtcaacagaggaatcccaactcccccaatcgaagtcgctactgctatcaagatcatggtaattttgtttggattagcagagaaataactaaacatgaccatgagctgcttttgactatagtctgtgaaccaagacatgacattgataaaggtcatctggtcaacaatttggaagagctgaatcgcagaaccagtaatgataaaaggaatagcttcccgaatcgtatcgatcaagagagcccgagtgtcaatcccttcacttccctcttgctttctaaaaatagaagagagcaagcctgtctttgcaaggtaataaaagagcaccagaaggctcgctcccataccaataaaagccgcaaaggtcgactgcgtcacagcctgcacgtaatcacctgagccaatcttcataatgaagaaggtcgtgagcaacatccagatgacccggatcacttgttctgcaatctggcttatagcgtaaggcttcatgttgttaaaaccttgaaaaaatccccgaatgacactcatcgaaggaaagatcaagacagcccaagaaaggctctgcatgatcggaatcaactcttttcccccacctgaaaggctagcaaagacaggagataacagatacataagaatggcaaatcctaggcctaaaattcccatgaattttaagaagccccgaatcaaagcaaagctatggtcggcttggtcccgggtattgtatttggctacttgcttggcaacagctacgggtaccccggctgtcgaaatcaagagaaaccaagcatagatattgtaacccattgtaaaaagaccattggcttgtggcccatattttcccatccaaatataccaaggaataatatacgcagcccctagcaaacggctgataaaattgctggctgtcatccaggcagtcccgcgtagcatctgggcttgctggtcattttgttcgtgactcattggtgtcctctttcgtttcttcttctcttcattataaacttttccatgacacttgtaaaatagggactttaggtttacaatagttttatgattacaattgaacaaaccctcaacattttaaaacaagaccaaaatttccgagaagttctagtaaatggtgaatactactaccatctagaaggaacaagttttgatgctattagctatgatagccgtaaggtttctgctagcaccctcttttttgttaaaggggccagcttcaaaaaagaatacttggaacaggctatttctgatggactcggcttttatgtctctgaaaaagattatgaagttggtattcctgccatcctcgtcaatgatatcaagcaggccatgagcttaattgctatggagttttatgggcaccctgagaaacaattaaaactattggccttcacagggactaagggaaagacaacagcggcctattttgcttaccatattttggaacaaagtcaccgaccagctatgctgtcgactatgaatacgacgctggatggtaaaaacttctttaaatcgaccctgacaacgccagagagcttggatctttttgccatgatggctgaggcagtagccaatgatcggacccacttgattatggaagtttccagtcaagcttatctagtgaaacgggtttacggtctgacctttgacgttggtgtttttctcaacatcagtcctgaccatattggaccgattgaacacccaacttttgaggattatttctaccacaaacgtctcctcatgaagaacagccaagccgttgtcatcaatagtgatatggatcatttccaagttttagcggaccaagtcgcgaaccaagaccacgatttttatggaagccagtctgagaatcaaattgaaaactctaaggccttcagcttctcagccactggtaaattagctggaaactatgaaatccaactgattggacatttcaaccaagaaaatgctgtggctgcaggtcttgcctgccttcgcctaggtgcgagcctcgaggatatccaaaaagggattgctaagacgcgcgttccaggccgaatggaagtcttgactcagcaaaacggcgctaaggtcttcatcgactacgcccataatggtgatagcttgaaaaaactactctctgttgtcgaaacccatcaaacggggaccatttcactagttctcggatcaactgggaataaaggagagagccgccgcaaggactttggcttactcttagaagaacatcctgagatccaagtcttcctcacagcggatgatcccaactatgaagatcctttggctatcgctgaagagattagtagttttatcacgcgccctgtcgagaaaatcgcagatcgcgaagaagccattcaagtggctatggcgacaaccagcaagcctgaagatgccgtcattatcgccggaaaaggagctgactgctaccaaatcgtcaatggcgtaaaagaagaatatccaggcgatgccgccatcgctgaacgttatttataatcaaatgaaagaaggctaggaaattttcctagcctttatttttttataaaaatgaatcgttctttatcaaattcgacagctaactcatactttccatcttcattttgaatgatgtagcccaataaaactaaactgtcgacaaagatatctcgacgtttctgcatgagctgatcttttttaagaaatttgagcaaaaagctagtcatatacttaagagcatactcgggattgacatctcccaagatggcatagagcttttcttgatcctctgtcaatggatattggtgtttcaccttgtagaagtaattggaaagggtctgtgcatttcgcgcaaagtccgtctcttccaccaaaatcgcttcgttggtagtattgcggagttctgtttggaagacctttgcttttaatttttgataaactgcactgtcctctcgaacaaagacctcctgatccaagtcaacaagatcagctgacttcaagaagggcaggttgagggtgtaacgtttattttctcgaaggatgaagcccgctttgatatactcctccatcagcttatccactggttgatctggaaattgggccttgatttgccgcaggatcacatcgtcgtgctgatccaaaaagttgatcaagtccttaagaaatggctgacgtgtcaaacgtgtaggattaatgattgtaatcataaataggtctcgtttactgttttatcggttcgttcttattgtaacataaaaattagtttaagcgaaatcaataccaaaggacaaaatcttcaatttatgtataggcaggcaagaggggaaaataaggcaataaaagaacttagtcttttcaatccaagtttactgtagaagccccataagttattccaactcatttcatttctattattttgaaagaaataaaatcagtcagtagttgcttaatgcgttctggacattcttcattgtccctactgtagatactcactaagccatgtaaaaaaataaagattccactacgaatatttagcgcttctgcatcagataagtctttcggtaaaaagacatcaatagcttcttccaataaacgataacttttcattctcaattgcatcaacggttgcgaacaatcgcctgaatcttcatgctctccacggtaaaaaatcaataattcataaaaattacgttctctaaacccaaaatccacgtatgtttgacagatttgaagcagacgttccttatcattctgcttggaatgactgatttctaagcaagtatgatagaggtgagttaacggtttttccgctactgcatataatatatcctctttctttttaaaatactgataaatagctgtatgtgaacatcctgcagcttgagcaatctgcctaattcccaccttctggtaaggttcttttcggaaaatttcctctgctactctgataattctggaccttgtatcctttgccattacaaactccctttaaacccattcaatgcctcaaaatctcgtactgcatcttttacctcactaccatgacaaacactaacaagtgcctgtgaataatccttgagaattctttcaccactagctaaagcttgtctcatatctgctgtatatcctttcattggtggacgcaactttccatttctcgtagctgtataaagatctccagcaattaaaacttgatcctcttcatggtaataaacaacatgaccaggggaatgaccaggagaaaatagtggttttagtcctgcactacttatcaagtcttgaccttcttgactttcaacagttataaaagtagccggatcaaaaatcactttttccgtctcttttctattaggaaaaggttctttgcctgaaatataggggaattccttctcactgattaaagtcgggatgttcccaaagtgctgtctaagatagggcaaacctttgatatgatctggatgtccatgggtcagaaaaattgcttcaattttttgtgggagtaaaaactgggcagcgtacttctccattcctcgcattcccgtatcaatcacataaaagcgactagatgattcaactagccatatgctgacaacaaaaacacccaattcgaactcaaactttcttatatgtggactgatttgttttgtacgtgttaataaacgatacaagaaagacatatttacttcctcctttgatttccatcaaaaactaaccagtggttagtttttttgtgaagtatatcatattttatctgtctaaacaagaaacatccagaggatattagaaaaaaatacaacttttacaagttgtattcgaaggtagaacatatttttaaaatattatttttctttagtttgatgtaactcttataaactgtatcaaagattcagattgttgtttcatgaatccaaatcatccaaatacctttctttaaactgtagctgtggtgattgggctaactgactcgggttggtcccgggctgatctagaggaacggctagaccgagccctctgtagtaatcttcccaaaacggactaatctcctgttcctcatctccaaacttcatgggaatggtttcaaaaatagggagtagttctgcgatgaactgggaacagtaataaccatctccatccggataaaaggaagcattgtagggagtccctaaaaggttttctgcccgcttcttgacttctttgagatcgattttcgggtagcgataaaggtcatatgctttctcagcttcaaagaaatcttcaggggattgggcaaggacaccgccttccaccgttgcatgataaatggaatcgtccaaaaagatggccacatggctatagttgccagttgatgtctggatggcttgccccatttctgtattttcactgacaaaaatcaaatcgcccgtctctaacatgatcttctcctagcaaaaaaggagccgaaactcctttttaataatgggttttcccacctatcattaagcattaaagctttctgtcaattgaggcaccacttgtttcttacgtgaaacggcacctggaaggaaagcgtggttgttttcaagtttgaagttgaaagcagcttctaccttgtccatattggcaccaagggccaaaatttctgagtttgagttgacgatatctgtaatcatcaaaacaaagtcagagtagccgttagctgcattggcagcttggatagctgcttcgatttcagcttggcgttccaaaacttccgcaatatcaactgtattcacttgagccacacgaacgttgtttccgttcaattcaaaagtcttagcatcgatatcgatcaattcttctgctgatttgcttgccaagttagtaccagccttgagcatggcaagaccgtattcttccaagttgacaccagccaattcagccaattcaggcgcaatgactttatcagatgggtgggtagttggagatttcaaaagaagggtatctgaaatcaaacctgaaagcatcaaacctgccaattcttttggcactgctacaccgtgttctttgaacatgcggtaaacgatagaagatgctgatccaactggttccaaacgcatgtaaagtgggctagcagtttcaaagttagccacacggtggtgatccactacaccataaacttctacttcagcaatatctgaaacagattgttggaattcattgtggtccgtcaagatgacttgttctgcaccttctgctttagctgatgtgatgacgcgtggtgcttccacaccaaaatagtccaatacgaaagctgtttcttcatttggagttccaagagccactgcttctgtatccaaaccataagcttcttttgcaagataagcaaaagctacagatgagccgatagcatctgagtcaggattttggtgaccaaaaacgagaatttttgacatatttctacctctttatttcatttatagattcactctattttaacacgtttttccgtttaaagaaagggaagaacaatgcattcactagaaaaaacagttgggattgccaactgtttttcttctttatcctttgacccgtttcaggtaatcttggtaactttctgtttccatcaaatcttttgcattttggacccgttcttttgtcggtggtttcacaccctccaatttgtacggaattcccaattcacgccatttgaattcccccatagtatggtaaggaaggatctcaaatttatcgacatttttaagggttttaacaaattttccaagttcgatcaagtcgtcatctcggtctgtcaaacctggcaccaagacgtggcgaatccaaacgggcttgccaatatcagacaaatacttggcacaagctagaatcgttttattggtatggctggtcacaattttgtgtcgttcatcattgatttccttgatatcaagaagcaccaagtctgtcactgccatcaagcggtcaaatttttccaaataacgaggcgtattccggaaaggaagagcacaggtatccaaagtacaatgaatgcccaactcttgagccttggtaaaaagtgcaatcaaaaagtcaatctgcaagagggcttctccaccactgacagtgattccccctttttcgccccaaaatccacgataacggagggcttcttctaagacatcatccaccgtccgctcacgggacttgttggtttccattgcccaagtatctggattgtggcagtattgacaccgcatttgacagccttgaaggaagacaataaagcggatcccaggcccgtctactgcaccaaaactttctgttgagtgtaccattcctgttacttttccatagtcaactgtttcattttccattgaggaacctcttctcttgaaaacgttttatgattttattataacacgattccatctattttaaagagtttaagcttctttttgaaaagaaactgttcttttcagtagttttcattgtcctagtacagtttccaatatgggactatctgtcctgtattttaggagaaaaaaagagccagcgactccttttttagatctttcttttgaaaacgttagtaagtctttttcttcttataccagacaagactcatcgtagctattgccactccaaaaagagctagatagcttgtttcttgtccagtagatgggaggattttccgttttcctggtgtcttcgtttctgttgctgcctcttccttgtcgtcttgcttctcatcttcgttcttgcccttctctttgctttcagatggtgaactcttttgttcattggcttgagcctgatgagggactagttgagatcctgtattcgatgaggaagggatggtttgatccgttggttgtcctgtattcccttgttgatcatccgtcggcgttcctggagtttgtgctccactaaagtcgatttggaccaagacaggatcatggtctgatgcacgaccatgttccttcataaaggaagcattgatatggacgggttcaaaccttgctttggctgccatgttgtttgagataaaaatgttatccaaaacttgattgcttccacggtagaaataagaatagcgatcgcctacatcatgttgagccattaagttggttagttcactacccgcaaggatctgtgccgtggttgagaaatcgtagtcattaaaatcacccgtcaaaacaaaggtggtcttaggattttgcttcaagccttcttgaacgaattgatggatgacactggcttgtgcttcacgagttggcaaggtatgttccactgctggttgacttgcaccataaatagcatcatctccgatttttgatttcaagtgattggcaatcaccacaactggttggcccttgaattcaaactcaacagctaaagacttgcgagtatgatcaaacgatgggtcatttggggcaatacgagctggatttttaaccaagtgtcccttgtcaaattgcgctgcctcgttgctagttgctgcctcttttttggctaaggttacgcgttctggattgtagaggattcccaaacgaatattggaaccaggctttcctccgtcagcgccatctactggagcaacctccgtatactcatagctcttaccccccaattccttgatccgattggctagtttgcgtccactttcaacaccactggtcgttccgtcatccacactaccattattgtcctgcacttcgatcaaagtaatgatgtctggattgtgaatttcatggataaaggaattggcaatcagcgtcaccttatcctctggggtttcatttttggcattgttggccgagaaattttcaatattgtaggaagcgatggtcagcttgtcctcacttggttgcgtttgagctgcttgacgctgcaagccaccatcttggaccgtcaactgttgagtgggctctaatttatagaagctatttcgatacgttaccactcctgtcacatcttctgtaaagtaatccttagcttttgcgacaaactgattcccaacataaatcgggatcgtcgctgtattttgcgcatgtggccgtagattcagacctccaatattgtttaaaggaagacctgtgaaatcttctcccaagacatagatatctcctttgtactggggaccaaggacatgcggtttcttcaccaccgtgagcattccttccaggctttcccaataatcgagggcatcggtttctggagcataagcagtcggattaggcttcacatctgctggcatgcccgcagtgatattcacagcttctggaagaggggctgtcccatcttttgtgatccaagcatcgaccagcatggtcactgttaaactattcgttggttccttaaaggtcttccctgctcccaaggtaacctcttccatatagccttccttgacggtaccggtgattttcaccttgtcgccgactttcaccttgtatttggaaacaacataaatcccatctgaagtccgactattgccatccgattcaatatcttgggcataaaaaccatagcggtctgtcttggtcaccactgcatttttgatggccactttttggccttccagtggagagcgttgcgcttccccttgaatgtccccgatcttaaccgttttctcctcagtatcgtctgaggaactgctagatgtctcttctttatcacttgaagctctcgtcgtagcttctgtagttgttgttgtagcggaagtcgaatgatttgtcgagccttcctcgctactagtgttcgtcacaagcgctggctctgaagtcgaagctgtggtctcgtctgcaactactgtaaaggtactactgaagacccccaactgactagccaataaggtggctactcccagtaagcgaatctttttaccgttttttctcatgcgtttctccatccctaaaaagttttcctcttttattataagggaatgactttgtattttcaagcgctttcaaaaatatttttcaaaaaacacttcgacccaaaaagatcgaagtgtcaagaacttaaactaaaattgccagtgtctgatacggtttcagaattactttttcagcaagctttacattctcatagttggacaggagcacgcgccctgcttggtagtcttctggaatcgctacttcaacttcacttccatagaaatgattgagtaccaagagtttttgaccatctaagtggcgttcaaaggcatagacttcttgactatcttccagtgctggctgatagctgccttctgaaatgatgggcatttctttacgcaagctaatcaattctttatagaaggtaaagattggtccatccatttccttttcaacattgatgtctttataggacttcccaaccttcaaccatggtgtgcctgttgaaaaacctgcattttcagaagcatcccattgcattggcgtacgagaattatcacgtgatttggcttgaataatcttaaaggcttgctcaggtgacttaccttgatccaagagcatttggtaagcattgatagactcaacatccacataatctgccatcgaatcatagtctggatctatcatgccgatttcttctcccatgtagatataaggggtaccacgtgacaagtgaaggctagctgcgagcatggtcgctccttcattgcggaagttcttgatatctacaaagcgattcaaggcacgaggttggtcatggttattccagaagagggcactccaaccatctcgttcactcatttccttgccccaagtatgatagagacgctcaagctcttgcaggaggaaggctttatcgagactgttcaagggatgggttcgcaagtttctagacaagcgcactttgacttccctgtttcccaattaaccagttatcaagaaatcgtcaaagctttcagaaaccaatgtcattcgtttagaaaagatcagtatcgatgaaaaaggcgctaaaaagacaggcttcccccttcaccgattggtttggaaagtaacccggcaacggatggtggatggtgtcgcttctgtcttagatattgattacttagacagagagctgatcccaggccttactaaggaaattgcccagcactctatctaccaatatatagaagaagacttgaaattgcagattggctatgctaagaaagaaatcttgatttcaccaatcgataatcgtgacaaaatcttactggatcttggaaaagaccaacacgtggtgacggtccgctcccaagttcacctagcagacggacggcaattccaattcaccgaaagcaggcacaaattagacaagtttcattttgtcgactatgcagagcggaggaaataaaaaaggagtttagcaaaaactccttttttctatcccaataccaattcatcactcaccagggtttcgccactgttttgttggaagaggcgcatcaaatcttcaaccgttaggtttttcttttcttctcctttgacgtcgacaacgatcttgccttggtagagcatgatcaagcggttgccgtattcaatggcatggttcatatcatgcgtaatcatcaaggttgtcaaatcatggctttccacgatcttttgtgtcaattccatgaccatttcactagtcttaggatcgagcgctgcggtatgttcatccagaagcaagagtttgggtttgaccaaggctgccatgaccaaggtcaaagcttgacgttgcccaccagacaaatattgggtatccaccttaagacggttctctaaaccgatattcagttccttcaaggcttcacggaataattcgcgatctttctcccgaactccccagcccaaaccacgagatttcccccgacgttgggcaatggccatattttcttcaatggtcaaacgagaagctgtccccatcttaggatcttggaagacacgcgcaatatctttcgcacgcttacgaacactcgtatttttgatggagttaccttctagcaagatatccccttcatccacgaccagatttcctgccaagatgttcatcaaggttgatttcccagctccatttccaccgatgaccgaaatgaagtccccttcttctacttggagatccaagccttttaagacatggttttcattgactgttccagcttcaaatgtcttatgaataccttcaattgataataatgttgccatacttttctcctacttatttcctaacttcagtccacgaacacgaagacgtttttgcgcctcaggagcgaacaagacaatcgcgagcaagatcgcattgaagagacggaccatattttgatcgagatttggaatctcgtaaatatttaagataatcaaacgatacacaatggctccaaccccgatggaaagcaagcgccaaccaatggtcaattcgtggatcaaaacttcagcgataatcaccgcactcaaaccgactacgatcgtccctgtaccagaagtcacatctgagaaaccatcattttgtgcaaacatggctccacaaagggcaatcaagccattggaaatcatgtagcccaacatcttcatgttatctacattgaccccatttgcctcactcattggaatgttatcaccagtcgagcgcaaaaccaagccaagttgcgtcttcattaagagagttaacaagatacagacgatgatcaagcaagaaatactaatcaaaaagacagcttcttcattggacaagcccaatttcatgacacttttgaaaatggtactggcatcgccaatagagaggttgggtactccccccatgattttaatattgatagagtagagaccggtcaaagtgacaatccctgtcaagagggctggaattttcatttttgtatggagaattcctgaaaccaatcctgcgatcatccctgccagaaaagccaataaggtcgccagccaagggtttcttcctgcttgaatttgtgaggctacaactgctgccccaagtggaaaggctccttctgccgtcatatcggcaatatctaaaattcgaaatgttaagtaaacaccgatcgccatgatcgaccacaataaaccttctgataaacttgataaaacgaaattcatctcaaacctcctatttttctaccttcaacgagctaatatcaattcctagttctttagccatctctttattggtatgcaattctaatttttcaggtgtttcaactgcgacttttccaggtttttcacccttcatgatacgaatagccatccgagcagcttgtctccccaattcctcataatcggtaccaaagttgtacaaaccaccagtggccaccatctcagcagatccaccaaaaacgggcaccttatggctgatagaaacctgtttgacagtgtccattgtagaagagataatattgtccgtcggaacaaagacgatatctgcctctgacatgatgctgtctgctgcagctttcacattgttactatcgagaattgttttttcaaccacttgatagcctttagcttctaggatcttcttcgcattgtctttttggacgacggagttaggctcactttgcgtatagagaatcccaactgttttcgccgttggaagcacttgcttaatcatgtctacctgtgtagcgatcgcatcttctgactggtcacttgtccctgtgatattgccacctggttctttcaagtttttcaccaatttcgctgccaaaggatctgtgacagctgagaagacaataggtgttgatttagtggtattagccaaactttgtgcagaaggggttgcaatcgcaaagactagatcactttcttctgccaattgtttagaaatatttttcagatttcgttgctccccttgagcattttggaaatcgatctgaatatttttcccatctacataaccctctttcttcaactcctcgataaagccttttcgtgtcgcatcgagcgacttatgggtgatgtactgggaaatcccaattcgaaagacattgtcttttttagtatcctttagattgtgtaaggtcaccaatgatgttaacagaagtcctacaaccaggacaggtgctagcaattttttcactactttcatttattgactccttttctgcaaaataaacaaaaaatccgcttagatgatactctaaacggatgcttgaaattctccaacaagttacaaaacctcggtccatttagatactagctctatggaccatcatcaaaaatcttagccacatagatacaaacaaattgcttgggttgtttgcatccatgagatcatgtctacaaacactatctaaagtagctaaagtaaaatttttgagttgaaatggcttgttgcttcatgtttattttctgctttctttttttatgggtattatcttaccttaattttttttggctgtcaagactatttcagaaatttttgaaattttttgaaaattcaactggtcctgacaagaaaaaaacagaggctggaacacgtccaggcctctattttttaatcttcttttgatttagtttcttcatcttcctcgacgatttcagaaatttcaactttcaccttggtcacacgaccattttttactttgtcgtttgtcaaaatgaggtgtttcttttgactatcgacttcacagctgagtcgctctttcaaggttggaattcgcccaacctctgtcagataataccctgcaatggtatccacatcatcactttgcaactcaacatcaaaatattcgttaaagtcatttagtgacatggctccttgtacgacataggtattgtccgcaatttcaaagacatcaatttctgctttgtcagtctcatcgtcaatttcaccgacgatttcttccaaaaggtcttcaagagtaaccaaaccagacatcccaccatattcatcaagcagaatagccatttgattttgggtattgcgcaattccttcaaaagatcatccacaaaaatggtctctggaacaaacaaaggttcttgtaaaatctttcttaagacaatattatcaaagccattgataaatccttcgttcaagagacgtttggtatggatgagaccgatgacattgtccttgtcatcatcatagacaggaatccgtgaaaagttttgcttaaggatactttcaatgatttctttggtatcatcattgatatcaaccatgaaggcatctgtccgtggcaccatgacttcacgcgctaccatttcatctaatgaaaagatcccttggagcatctcaatctcgtccgcatctagtgttgcttcactattggtcagcatatactcgatttcatcccgcgtcatcttttcatccggatcatcgaattccattggcgtgatacggctcaaaaggttggtcgacgctgaaagcaaccaaacaaaggggctaacaatttttcctaataaaatgacaatcggagctgttcgaacagctaactcatctttcaggttcatagcgattcgtttcggatagagttccccaaatacgatcgaaatataagtcaaaaacgctagagataaaaagcttccagctgcaatagccgttttagtattgcccatccatccagcaataacatgaccaaggctatctgcaagactcgccccagataagatggtaatcaaggtgatccccacctgaatagtggataaaaaatggttcggttgctccaatacgctaagaagacgaatgtattttttatctccttcttcagccttttgctctacacgagagcgattcaacgataccattgacatttcagtcgccgagaaaaaggcgttcaataatgtcaaaacaatcaataaaataaattccagtaaaatttcctgactgccagggtcttccatggataatttcctccagtatataatattgtatattataccacaaaataggagagcctgcattcttctataaaattttctttttttaccatcaaaaaatcaggaacaagtcctgattcttgaatgtgaacaaattgttttttcaaacgaaataacctaactgaagctgaaaacttaaaacaatctatataatcagtttcatccaaacctacactgaaacttttcgccgtgagaaaagtgctagaaacacgattgtttctagcactcgggagttttgggagtaaaacagtttgggaaactgttttagcctgagcctaaaaaattaaaaagcgaaggggtccaaaacgaattgaacacgggctacggatcgtgtcaaaaagataagttttcctagaatctaaagattctgcgtcaaacttcctattttgactttatccgcgaacgccctttgtatcttaattagtcatggaacttcttcgaagttcgctgacgtccgtactcacctaaggaaagtttctaagaaggctttgtctttagtgttctgcactggtaaaatcataaaagaaggcattgagtttttcaaccagctcaagcgatgagagactacttgtacagataaaaggttttttctttaattcaggcatcataaagttggccaccaccacatctgcatccgaagcttcgatatcatccactgtcagattgtacttgatcatctgcgtaaattcaaagttatccgtgcagtagaaatctagaaaatcaatcatagatttggcgtggtgatcgtcaaaacgactgataatcaagaccttaatggacttccgacggcgcaataactgcggtaagagacgctcccagtgagtatagaccgtatagatcatatgcttgatgatctcatcattcagatcatgcttcatggtcttcatataagtgatgatatgctccttcaaatcatcataaaaggcagggaagatgctcataaaatcttcgttggtattggtcttggtatcaaataaaaggaactcagagaataattccttccggccgagatgagacgtgttatgaacatgcattaacatctcatcaagattttcaatttctagttcataggtatagcatagatccttgaacatatctttgatgagtttggtcgactctttggcataaggatctgtttctgcagcttcgatcaagctttctgggctgaaatagaaattctcttgaatgaagatgatgaagaattgctccaacactttttcatttaactcgacacccaactgcaaactaaagtagcgcaacatctcctcaacattggtcaccccttgatactgatctttataggcttcaaaggtcgttggcatatcgataaagtaaccttgtttaatccgtgacaagtagactgtcaagagaactttataagacttgatgacagagaaggtcaatggatagccatagagcttgaagaagaaggtgatcaaatcggtcacggcctcttccttaaattctgggaaaggccactccatatagtaataacgttccgcaaaatactgggcatagaagaaacgaacatccacttcatccccgacaagattcaagggtttcaaatcaatctttacattgtatttggtttgaagcttctgattgatcgtccgaatcaagcggtagaaagattggtaactcagatcaaactttctgcaaatatattcattggaaacatccttgtggaagaagagatattcaatcaaggcgaaggcttgtgattctttaaaaaagtgatggtaaatcacctcaagaccaaccgaatcctcataactgatcttgatcccattggtggacgattcaattaaaaagtcatcaaatgtactacgaagattagacaaatcttcttttaacgaacgttctgtacaatccaaacgcttggccaactctttcaagtggaaccatcttttttccttaatcaagatttccaacaattgcaattggcgtctctgttttttcgataagagcagtctcatctttccctacctaatttcatattttctttcaaaattacttatattttaacacatttcatagcacttgttgacttttttccagcatttttcaaaaaaatgtacaaaaaagactccaaggcccatataggcgctagagtctatgatttattaatgataccaaattcttcttttttcttctgctccttagcagcacggtggttatcataaagatttaccaagaattttacaatttcttttccaatcgaatagactggaatcgcaacgaccatcccgataatgccgtagatattacttgagagcaataagagaaccataatggtaatcgggtgaaccttcatcacgcctccaacgatacgcggataaagaatattcccatcgatctgctggataatcaacatgtaaatgactgctttgatcatcatatccatatctgtgaaggcataggtgatgatcatcggaatcaagccgatggttggtcctacatatggaatgagattggccaatccagaaaaaatggcaaagactaaagcgtacttcaatccaataaaactatagccaatgtaggctagggttccaatgataaaggcatcgatcgaaatcccactaatatagcgagagaccgtttcattcaaactaatcaagaggcttgaaatgtggagtttgtcattgcgtaaaatggtccgctccaacatcggtaataacttcttcccatcgaccaagaaataaaccaagaagacaggggtcatgatcaagataaagaccgtattgacaatggtgttaaccacactgcctaaactgttggtcacactattcaagagattttgtaggatatccatataagagagattcaactgctgaatcgtcgactggatattcacattctggaacaaaggattggttgagagttttcgaaccaaactttgaacttcccagtaaagtccttgagttgaattgatcaagctagttaactgattgattaagatagggagcagataaaagatccctaagccaatgatcccaaacaagagtactaaggtgatcaaaatcccaaacacacgcttgatttttaaatgtttttccaacaattcaacaatcggattggtaatgtaatataaaaaacctgcaattaaaaatggtaagaggatggtattcagaacagatacaaatggagaaatcaaagtccccattgatttccaaatatagaaaatcaccgtcaataataagatctcacatgtccagaataacaatttactatttcgaaacattccttacctcctgttttctattctaccatattttatgatagaataaaggagattttaatcaaaaggatgaagttatgaataatttgattgaactacaagacgtcaatttgatccgcaatggaaaagcccttttaaaagagattaactggcaagtaaaagaaaatgaatgctgggccattttaggcttaaatggagcaggaaaatcgaccctcctcaaactgctcatgtctgaatactgggctagttctggccaggtaacggtccttggaacccgctttggagaagggggtattcctgagttacgtaagcgtattgggatcgttagctcctttatttcagaaagactgccagaacatcttttgacagagcaaattgtcctaactggtcaatacaagagcagtattttatatactgcatacggggaggaagaactgaactgggcacgggatatgctaacttcaattggagctagctctttgatcggccgcaaataccgggagctctcccagggagaaaagcagaccgttctcattgcacgaagcctcatggaccagccagatctgatcatttttgatgaagcttctagtggattggatctctttgccagagaaaagctcctccgtcagatccatcatatcaaacaactggatcacgcgcctaccatgatctacgtcacccaccatgccgaggaaattacaacagatatgacccatgtcctcttactcaaacatggccaagtggtcgagcaaggaccaaaggaaaagatcctaactccccatgtccttagccaattttatgaagcaccagtatcccttattgatcttggtgatgagcgactctttgtcaaaccagaaatcgcacactgaaaagaaaatgaataaagcaaaaagagagtgggacagaaatcggtaattcgtcagaattcgatttcgtcgtcccacctccgcacagttgagtagggctgtaaaagctgatgaaatcagcgtagtagagtccactcaaccactgcgtcttgatcgacaatccaaaaataattgagaggctaggatttttgtcctagcctcttttactcttatctcaacgattccgtgcatactcgatcaaatcgtatggaagcgtattggcactttctcttagggaatagctttctaattcattgacattttgccgcatacggcgcgcttgcttagcggtaatcaggtgttgcgcttcatattcaaaaataatcttacgctccaaataatagcctctcaacatttcatcgatattatttggtttcacgcgattaataacccgctccacaaaggccccactggtaataatagctgtctctctcagacgagattcttgtaggaaagaaatcaaactgctccgataaacccccttgaggtcttccaaactttcgatgatgatttccgtattggccagataaagggccgcaatctggtcataatcaatggcctctaacttgctgtcttctcgggcccaccagtttcgcaagccagacccaaaagttaagatctcatgaactaataaacgcaaaaggcggaaagacaccaagaggtaataggttaagcgagacgaaagattgcgattgacacgttgctccatattgcgaagatagcgttgatagacgcggtagccccgctctcgaatcttcccttcttcataagcctgttccaagccgtcactttcaatactcaaaatcaggagcttcaactgttcccagtccttttgaatgagcctgttttcttggcccagaatcaagttttctatgcgaccatggtagttatcaatcgccgcatacaagggtcccttgtgcttgctattctttaggtctgcttctaattccatgacgacatcatttaaaatcgcgatctgcatcaggtagtcattggtttcttccttttcttctgataattttggaagtaccactaagccagcaataaagctgacaagagtaactcctgccactaaaaagagtaggatagggtattctttttcgatcttggttggaatcaaaagaatcgtcgcaatcgaaaccgttcccttcacacccgaaaaagtcagcaataaggcatcttttagataatttctcaacgatttttttagtcgagccgttcggaaccaataaaagaggtaaaccatgacaaaacgaatcaaaaagagcaaggctgtcaacacaaagaccgaaagaactaaaagaagatcattgtaaatgggactacttaagatgggcttggaaatcatttccaattccattcctaagatgacaaagaccgacccatttaagataaagttgaccgtattccagacagtatgactcacagtatctacccgcgcttcaaggagggtaatgtgcttaaagcgactggcttttaggattcctgacacaactactgcaatgataccagagacatggagttcttctgctaagaagaaggtcaacaaagggaggcttagttctaataacaattcactggcaatatcactggcgcgaacactcaagagtaaggtttgcaaccaacggttcacaaaggccgtcaagatccccactgcaaatcctccaatgatggagattcctaaggaaacccctgcctctccaagagagaaacttccggtcgcaagggctgccaaggccactcgaaaggcaactagacctgaggcatcatttagtaacccttcgccttttaagatattcgaaacccgctttggaaagctaaagcgctcagacagggaggcaaaggctactaagtcggtaggcccaagggctgcccccactgccatacaggctgctaaaggaaggctcagccataaggagtgagctgcccagcccaaactaatggttgagataaaaatcactgggaaaatcaaatagaggatgatccgccagtgtttcaagacagaagtaatatctgcttcttctgcctctcgaaataagagagggccaatgaccaaggccagaaagagctcggtatccagatgaaaattttcttctggcacaaagagagcccaaccaatccctagtaaaatttgaatcaagggcagaggaaggctcggcacaagtttattcgtggcatttgagacgatcaaaatcatcgaaaagatcactgtataaaggagtagttccatatcactccctccttagcgttcttggcagcaggtctcaaattgctgttttaactccgcaatcttttggtctgtcttggttacatccttgtgctcaatcttcttttggcaccgttccatctcaagcgaaaccaatttcttttttattttgagcatctttttggtcatatgggcttcatcataaaaacccattgcacgctcgtggatggttgattcaacaaaatgatgtctcaatccttcgattttattctttaaatattctttatccatgacggtagctttctaatttttcgatcatgaccaaaaagggtggctgattcacttgattcagtgtccggtagatagtcgctgtatagtctttttgaggcagatgactaacaaagtccagcactgcatcacgctcgatgtctcctccctcatgaccataatagatcataatagccattcgcccacctttttctaggcgagcacagattttttccatcgcttcaatcgtggtagctggaagagtaatgaccgatttatctgcagatggcagataacccagattaaaaatagctgctttgatggtctccacatattggtccacatgctggtggccatccaaaatcaatcggacatgttgaagtcccaacttctccaatctttcttgagtatttacaagtgcctgctcttgaatatcaaaggcatagacctggcctgctagttgggctaaaaaggccgtatcatgtccatttcccatggtcgcatccaccaccacatcttctttggtgatgacttctgctaaaaattgatgggccatttcaagtggtcgaagcatcggcagtctccttttcttctagcttacatccttgggtacttccacgacgacgcatttcagtttcaatggcgtttaggacttcccatttgttgaggctccacatagggccaatcaacatatctcgtggcgcatccccggtaatccggtggatgacaatgtgtttggggatgatctccaactggtcacagatgaccttgacatactcctcctggctcatgagttgaagtcgtccttcatgatagtcccgttgcatccgtgtattggtcatcaaatgcaagaggtgtaacttgatgccatcaatttcattatcggtcacacaacggcgaacattttccaccatcatctcatgcgtctccccaggaaggccattgatcaaatgggagacgatctctgccttgggcacctgtttgcgaatacgcttgactgtttcaacatagagatcataactatgggcccgattgatcaattcagaagtcgcttcataagtcgtctgaaggcccaactcgatcgtcacatgcatgcgctctgtcagctctgctaggtaggccaaggtctcatctggtaaacagtccgggcgcgtaccaatgttgattcctaccactcctggttcattgatggcctgttcataccgctctcgaatgacttccactttatcgtgggtattggtgaaattttgaaaatagaccagatacttcttcacatctggccatttccgatgcataaaatcaatctctttgtaaaactgttctcggattggagcttctggggccacaatggcatctcctgaacccgagaccgtacaaaaagtacagccaccgtgggcgactgttccgtctcgattgggacaatcaaagcctgcatcaattgggactttaaaggtcttttctccaaataaggttcgataataatcattcaaggtattgtaggatttcatacccttcattatagcaaaaaaagagtcgaactcaaaacgcgagttcgactcctagttgttagatgcttatttttgcttgcctgtaaagcgccattgaaatcgcaagcgatcatacaagggatactcaaactgtaagacagcaagacccaaaatcatactgccgagaacgtctgatgggtagtggaccccgacataaacccgggaaaccacaatggtcacgattcccagaaccagcaagccttgaaggcaatagcaggctgttttatgttttacatgttggctgatgatgatgatcaaacttcccaaaacaagggtagacgccagtgaatgaccactcggaaaagaaaatcctttttcctctactagatgaagaatacttggtctcggtctctggtagatattctttagaagaagaaccaaaagaccagtcaataccagattgcttccaagaaaaagagcttcactgtaccatttcttgtaagcaaagaccgctagcagaagacccacccagatgacaatgatcttggtatccatgacgtgggtcaccttggtaaagaaggccgtcagtgctgcaggcagatcgcctcgaatagcagattgaatggtgctatcaaagcctgttaattgttgcgggtaaaagcgaatcacatacccaagaatgacaaaaatgagaagggcgaagcttgccttcgcccaatgttgttgtttatttttcatattttttcaaaatcggttgcaataaggtatagatcaacccaaatgcgatggcccaaatcactccttcgatcaggttaaacggtgcaaccattgcagctaaatagtggacaagccctagtgttttcgaaatattatagttcataaaacgagcatacaaagggattgcatagacatagttcaccaataccatcgcgatacttaagctgatcgttccaacaatcgttgccaggacaaatcgaccatgggtccgttccttgttccaaatccatgcaaaagaaaggacaaaaacaagaactccaatgatattgattggtaatccaatcaaggtttcaagccccttattatttagggctaatttaaggacagatcggatcaaggttacccaaacggcacttttaaaatccaataggaccaaggccaacaaaatggcgatgatactcaaatcaattttgaagaaatctatcaagaaagaaaattgatagaacatcaaaataaaagataaagcggataaaacagccactagggtcagtttacgtgtatttgtcataacaggttcctccaattttttaaaaattagagaagctggaaagacgtctactccatcattctactctaaactatttaaacaaagcttaaactcgaaaccattctagttactctagctggtctccatcgaaacatgccgttagtcagtcccagccactaacgttttattcccatgcatcagctctaaacagatcagaatagctgtcagtctattcgtctctcgtcttctcccatccagactatactgtcggttgtggagtcacaccacatcagcttgcgctcgcggacttcttttagagtatggaaaagaacatttcctagtaaaagtcaccgccggtcgggaattacaccctgccctgaagacccttttatgataacaaaaaaaacttgcctaggcaagtttttgtaactttatagattacatcgttcggtcttttagttttcatcggctatttgagcttgtcgtgctcataacgatggctcaactccagccctttaaagccctgctggcgaagagcctcatagacaatcatgcagacggtattggagacatttaaactacggacatgctcgtcattcatcggaatgcgaatggccttctcttcgtgctggcgcataaattcttccggcaatcctttatcttcgcgtccaaacaagaaataatgggacttcccatcctgataagaaacgtccgaataggtctgatttgcaaacttggacactaggtgtacctgaccgtcgcgcgccgcttccataaactcttctaggctatcataaaaacggacatccagcttgtcccaataatcaagtcctgctcgcttcattttgcgatcatcgatcggaaaagccatgggacgaatgatatgcaagggggtattggtcgctgcacaagtccgtgcaatatttcccgtattttgtggaatctgaggttggaacaagacgatgtggttttgagcagctgactcttggtagtccagttcttcaatattcatactcgatctctttctgataaaaaaatagccacactgcccggagtcaagctcagcaaacagcgtggttacagcttcattaacttaactcacaacaggtttgaggtaaatcaacgaaggtactttctaagtataacacttttgaagctcctgtcaatagtttttttagatttttttaagaaactttaccaaagttttcaatccctcctcgttctactcttttgacgatttttcctacttgttcttagcttctcaaaattccaccagaaaatccttaaaaaagatgaatttttcttgaaaatagagtatgatagaagcatactctggaggtattctatgaaaattattgttgttggtggaggaaaggtcggaacggccctttgtcgttctctcgttgctgaaaaccacgatgttattttgatcgaaaaagacgaatccgttcttaaccatattaccaaacggtttgatatcattggaattttaggaaatggggcaaacttcaagatcttggagcaagcagatgttgaagactgcgacatcttcatttccatgaccgagtacgacgaagtgaacatggtttctgctgttttggctaaaaaaatgggggccaaagagaccattgttcgagtgcggaatccagaatattccaattcctacttcaaggaaaaaaatatattgggcttctccctggttgtcaatcctgaattactgactgctcgttacattgccaatattattgatttcccaaatgcgctttctgtggagcattttgccaatggtcgggtagccttgatggaatttaagatcaagccagatagcaatctctgcaatatgagtctctcccaattccggaagaaatacggaaatgtcattgtttgtgcaatcgagcgtggcaacgaactcaccattccaaacggagactttgtcttacaacctcaagacaagattttcgtaacaggtaatcggatcgaggtcgttctcttccacaacaatgttcgccctcaggtcattaagagcatgatgatcattggtgctggaaaaattgcctactacttactcaatattcttcaagatgtgcgccgcaagatcgatctcaaggtcttagaggtcaatcgcgaacgggcggaattctttagtcaggaatttcctgatctctatgtcgtccatggagacggaactgctaaagacattcttttagaagagagtgccaataacttcgatgctgtggctactttgacaggggtcgatgaagaaaacatcatcacctccatgttcttggattctgtcggcgtcaaaaagaacattaccaaggtcaaccgaaccagtctgttggagatcattggcgatcaagatatgaccagtatcgtaacgccaaaacgcatcgccgtggatactattatgcactttattcgcggacgttacaatgcacagttctcaaacctagaagccctgcaccatgtcgcaaacggtcggattgaaaccttgcagttccaaattaaggaagacaataaactaacccaataccccctctctgaattgaaattgaaaaaaggcgtcttaatcgctgccattattcgagatggtaaggcgattttccctaatggagatgaccgtttgatggtaggagatcggattatcgtaaccaccttgattcaaaatgtcactaaaatctacgatctacttgagaggtaagccatatgaatagaagcatgattcgttacctcttgtccaaactcctcttaatcgaggcagcactcctgatcgttcccatagtggtcgctgcaatctatcaggaacctgccaaggtttttgtctcaattggggcaaccatggccatcttacttgggctgggactacttggtagttttcataaaccaaaggactttcacatctatgctaaagaaggagtcctgattgtagccctctgttggatcctctggtccttcttcggggcccttccctttgtcttttcggggcaaatccccaacattatcgacgccttctttgaagtcagctctggctttacaacaacaggggcaacgattttagatgatgtgggtatcctcagccactctctcctcttttggcgtagtttcacccacttgattggggggatgggagtattggtcttcgcccttgcgattatggacaataataagaacagccaccttgaagtcatgaaggcggaggttcctggtccagtgtttggcaaggtcgtttccaaattaaaaaacacagctcaaatcctctacttcttgtacttgggcttgttcttcctttttgtggttctttatttccttgctggcatgcccctttatgatagttttgtcatcgccatggggacggctgggaccgggggctttaccgtttttaacgacggaattgcccactacaatagtagtttaatcacctatttggtcagtatcggggttttagtcttcggggttaactttaacctctactacttcctcatgatccgaaaattcaaggccttctttaaagatgaggaattgcggacctatatcaccatcgtcctcgtgtccagtgtcttgatcgcttacaatgtccttcatctctatgccaatgtcgctaagagttttgagatttccttcttccaagtttccaatatcatcaccaccaccggttttggttatggaacgacggaaaaatggcctctcttttctcagttcatcctcttgatgctgatggtcatcggtggttctgctggatcgaccgctggggggcttaaagtcattcggtgcttgaccttatggcgaatcgcaaaaaatcaggttctttcgaccttgtctccgaatcgcgttctgaccttgcatgtcaatgatacggtattggataaggatacacagcatcagatcctcaagtactttacaatatacagttttatcacgatcggcctactctttgtagtcagtctagacaataataacttcatgacggttgtcagcgctgtctttagttgtttcaacaacattggacctatgattggaacaggtcaaaccttctccatctttagtccgatttcaaaactgttactttccttagccatgattgccggacggcttgaaatctatccaatgattctactcttcctccctaaaacatggtctaaacgctgatagacaactcttttacaaaatcaacacccttagaaaaataatttctaagggtgtttctgtttatttgcgatcgtcctattttgattcttcatttcgcttcagactaaaatggtctggcaaggggtctggtcctactttggttccaggatggcaacgtagaatccttgcaatccccatcaagacacctttcacaccaaaacgttcaatcgcttggatcatataattggaacaggtcggttgaaagcgacaagaaggcggaaataggggagagatccatttttgatagcctctgaccagcgcaattaggattgttttcatgcttttttagatttagtcactgctagattgtgcaactggctgatttcttttttgttcaagcgacggtattcacccggacgtagccctgagacgtccaaatttccaaattgggttcgggagagtttatctactaaaagtcccacagcttcaaacatctttttaacctggtggttacgcccttcatgaatggtcaactgaaccactgaacggttcttttcgacatccacttttaagatctcgtaagtcgctggcttagttttctttccatcaatggtcacccctcgcgtcaagggacgcaagttttccttattggcaatccctttgacacgcgccacatagaccttatcaatttcatttcgcgggtgaatcatctcatctgtaaaatcgccatcattggttaaaatcaagacaccagatgtatcccagtccaaacgtcctactgggtagatgcgctctggtacttgagataaaaggtcaacgactgttgtccgccctttatcatccgatacactagagatgacgccacgtggcttatttaaaagatagtagaccttttcttcgttatagattggagtcccttctacttcaacctgatcaccggttttaatgatagttgctaattcacgcacgacttggccattgactgtcaccaagccttgcttgatcagttcttcggccttgcgacgactagctacgcctgcatgggcaatatatttgttaattctcatctagttcctctgttctctctgaaaataattgaccctcttctggatcgatgtccacttcctcaacctttggcaattcctccaaatgattgatccccatataatccaaaaaatactccgtcgtgacatacaaattaggacgcccgaggacttctttttttccgtcttcgcggatcagatcaaatgacagtagtttggtaatggcaccactggaattgacgcctcgaatatcatcgacctccacgcgggtgatcggttgcttataagcaataattgacaaggtttcaagggcagcccgagacaaactttggttcataggcgttctagaatagtctcgtaaaaccgaagcgtagtctgcctttgtcaccaatttataacgggaagctgtctccatcaaacagagactcgtatctgtatcctcctggtatttttgggccaatttttctaaactttgcaccacacctgttgggggtaaagagagaagatctgcgatttgtctggcagtaattccctcttcacccgctacaaataagagtgcttcaatttcagctaatttgctcatgttcaatcctatttaagtaaatttctccaaaagccctatcctgtaccactgtgacctcttgaatcttgattaattcaagggttgcaagaaatagggtaatgacctcttggagatccgctgcttctagaaacaagtcctgtaagagaacttgtgagcgatcgtggaatcggtgacgcagctggtccatcagatcctcaatcttgtattcatccttgacaatggttgtatggttctggcggaattcttcttttttcttggtcaatagttttgagaaagccaagaagagatccaccgtggtgcgatcatggagtaattcggtatcgtcataaatcaattccatctttggttttgaataatagagggcgcgctcctcgtgctgtgaggccatcaactctcctaattgcttgtaagtacggtactcttccaattgagaaaggaggtcctgctcgagatcctctgcttcatccatctcctctgcaaccttaggaagaagtcttcgactcttgatcaaggttagttgactagccatcagcatgtattctcctgctacctctagtttcatagcctggagggtcgccagataagccagatactgttcgatcacctcaatcaagggaacctcataaatatccatctggtatttagagaccaagtggagcaagaggtccaaaggcccttcaaaatctttaattttaatatccattatttatatttttctaatgtcaccatggtttttaggcccaattcacgcgcaatactaaaaagatccacaccgagttctcgttgtttcaaaatatattgctcacgaatcgattgtgccgaaaggtcttgattccctttttcgatcaagaaggcttctaattgtcgaaatccccactgacgggagtatgattttcctttattatcaaagagataaataccatctaggaagagttgcaactcatccagtaacggctctggaacctttaaaacccgtttttggccatctttgcccactcgaatgacgtgaaagtccagctgaatatcttcgactttgacttggaggatctcgcttggcaataagcccatctccagaatcaacaaggccatcaagcgtccctgagggttagttgattcttcccaaaaatgggtcagatccaacaattcccgatcatgggtcttggccggttgaattttaggcaataccaaacgatggtattcagaaataaagcgttcttgatacaaataatataaaaattggttgacggcagataattttcgtttttgaaccgccggtttaaaatctttaatcgaagcttggtaaattctcaaatttgtcggtgtcacttttccatggatcgactcaataaactggtccaaatcatagaaataggcagactgagaattttcacttaattctttttgatcaataaaacttgcaataaattctttcattttggaatcatctcgtattcatttgaaaaatcatgcattagcgaattgatggctttaagaatcgatttccgcgtaataatcccttggaaataaccttcttcatccaccactgataagaaggagtcatctaccaacttgtgaaggacttctgtcaaattgaagtctaagccgatgactccgacctccttctttgcaacgtctacgatatccatcgaagcaaaagtctcctcaggaatctcgtgtttcaattgataagatagaatatccgttagggagatcgttcccacaaacttgcgttcatccgtcactaccgggatacgactatagctaatctggctcaacagcaagaccgcatggtctacattgtgggtatcaatcaagaccgctaaatttttggcaggagttaagaacgtctcttcctgcgccagcaagaaacgttcaaattcctttgctatcatctgctaaactcctttgtcaattcagggtacaattcatgatctcgcgtataatactctaccttgaagttcgaatcggtaatctctatcttggcatacaaacactctcgaatcagaccacgtggttgactaacggatccaggattcacaaagagggttcttccttccttccaagcatctgggatatgaaggtggccgtatagacagatatctgcttcctcctcttgggcccacagatccaatttttgaaaactaaaattgatctggaagagatgcccatgggtctggatgatccgtgtcggccctagttgggtcaccaagcgttccggatagccatcataaaaatccatatttccttggacaacgtggatcccttcccagacaggatcgtcactttttagttcagaatccccattgtgaaagatcccatcgacctgacctaggtatttttctttaatagcttcaacaatggagcggtctccatgcgagtcactcataacgatgattgtttgctttgccatgatggaaatacctccaataactttttaacagctaaagcacgatgtgattgtgtatttttttcttctagcgttaattcagcagcagcacggcccgtttccccaactaagaagagagggtcatagccaaagccatgttcccctttgggctcaaaattaatataccctggccaatctgcttccaccactaggctttccttgcctggtcttgcaaccaccaaggtcgtatggaactgagctgaacgatctttcaagtcaaaaaccatggccaattcgtgcaacaatttcgcattgttttccgcatctgtcgcaccaactcccgcaaagcgagctgaccaaactcctggtaagcctcccaagatatccaccttcaaacctgaatcatccgctaagactgttttcccagttagctctgcaatggtttcagcttttaggcgggcattctcttcaaaggtcatccctgtctcttcgacttctggaagctctgggtattgattgagattttccacttcaaagcccagcttttcaaacatattgcggaattctttggtttttccctcatttcgagtcgcaatgagaatcgtatctttgaccttgtcttgacctaagaaggcttccaaatccaccccatcacttggcaaatgcaagtaaagcaatttccctttttcaaccaagagcaaggctccttgacgctgtacgatctcaaaagctcttcccttgacttcattcaagatttcggtcaaaaaggtcagaaaacgaaaggctgaaccatagcgcatcaccgatagattgagagggaatccttcaggatccttggcaaagagaagttccagctgatctaacagagtggaagcttccgcaggtacttgactaaattggttgtagtctgcatcatctccccattgggcaatataccaatcttggggatctttgtattcaaatagtttgtcactcataaatttacatgctccacattcactgaacgttctagccatttttcggcaatcgctgcaaagctattggcatttgcagtggtataaaagctgtgggtctgctctaagagttcgcgactcttattgagctcaaaatagtttaataagacggaaatatcccgaacacactctgccccactatcaatcaatttgacatccggtcccatcacattttgaatgatcggttttaaaaggggataatgggtgcatcccaagaccaaggtatcaacctttccaactagtggttttagggtttcataaaccacctttttggtcacactggatgccaactcgtttgattccactaaaggaacaaacttgggacaagctaaactgctgacttccatgtctggtgctagactttgaatcttctctttataaattccagaagaaaccgtcatcggtgtcccaatgaccccaattttttgatgggtcgtcgatttaatggctgcagaagctccgggcaagatcactcccaaaacgggaatatcaagtttctccttgacttcttcccaaaccactgccgtcgctgtattacaggctaagacaatcatcttgacatttttggtcagaaggaagttcaccatctgccaagtatactcgcgaatttggtctgctggtctaggaccataaggtgcacgcgctgaatctccaatatagacgacatcttcgtgaggaagctgacggagcaattcgcggacaacagtcaggccacctactccagaatctaaaaaaccaatcggtcggttatccatatctcttccttccaaaaggagggactaagaaattcctccaagcccctctcatttattatcgtgagattgccccactcttattttttcttgtttttcgccattgctgatttttgttggttcacaatttggcgatagacttgttgaacttttgcttcgcttggacgttggccgctggcacctaaaagcgtacggactgcttcaacattcaaacgtgggtttgatgcaaattctttttcaaattgacgacgaagcaagaacattcctgcaatcatcccaccaaagaaagctaaaataatcaacaaaattcctaaaaagagattcataaaattttctccgatccattatttttacataactatcattatatcagacaatcgcttatttttcaatgtcaaagccgtagagtgtcgcaagataatcttctggtttttctgcgcgacgaatcaaacgggcctgcccatcttcttgaagcaaaacttctgctgaacgcaacttagcattgtactgataccccattgaaaatccatgggctccagtgtcatggatcacgagcaaatctccaatctccgtcacaggtagttctcgttgtttggcaaatttatcgttattctcacagagacttcccacgacatcgaccacttcagtcagttcctctggacgatccatattggtaatatggtgataagcaccgtacatagccggtctaagaaggttcacagctgaagcatcaaccccgacataagtccggtaagttttctttttatgcgtcactctggttactaagaggccgtgtgaagccagcataaagcgaccaagctcggtatagattttcacatgaccaagtcctgccggtttgagaatcgcatcaaagacgcggtgtacgccctccccaataatggcaatatcatttggttcttgctctggcttgtaattgaccccaaccccaccagaaaggttgatgaagcccaagtggacacctgttttctcgacgacttctactgctaattcaaaaagttgacgcgctagctctggatagtagtcgttggatacagtattagaagctaataaagcgtgaatgccaaactcttccacacctagttctttcaactcgataaaggcttggatcaattgctccttggtcattccaaacttggcttcttcaggattgtccataatatcggttcccagttcaaaaactccaccaggattatagcggcaagaaatgaccttgggaatgctagtcacagacttcaagaaagcaatgtcttcataggcgtccagattgatcgttgcccctaattctctagcatagacaaattcatctgctggcgtattgttagaagaaaacatgatctcttttccactaaagcccagtttatccgccattaacaattccacgtagctggcggtgtcgacaccacagccctcttcttgcaaaatttttaggatcgatgggttaggagtcgccttgatggcaaagtattctttaaaaccttcattccaagcaaaagcttgatggagagcacgagccgtttcacgaattcctgcttcatcatagagatggaaaggggtaggaaattcttgggtcagactttctaattgttcacgggttacaaagggtgttttcataagcgctcatttctattctttagtcactattagtatagcacaagtcgaaagacaaaaaaagccgaggcaactgccccagctcaatctctctttgattagtcgtttcttccgaagatacgaagaaggctgataaagaggttgataaagtcaagataaagttccaaagccatcgctactgcccaacctgtagcaggttgaccatttgtttgatcatagacatagcgaatcttttggttatcccaagctgtcaatcctgcaaagaggaagacagagataatactcaagatatagtccattccagaacttctcaagaacatgttcacaacagaagcaatgatcacaccgatcaagactcccatcaaggcacgtcccattccagacaggtcttttttcacgacgcgtccgatagctcccatgacaataaacatcaaggcactgaccaagaaagccttatagacagttgcttgcatgtagcgagcaatgataaagctcaaggtaaagccattcaaagctgagtagatcaagaagatcggaagagcagacgggctatttttaacagccttcccacttgcaacaaagaccaagatcaattctacaaccactgctgcgtagtaaaccattggtgcggttgtcaagatttgtacgaagaagtcttgaaagactgtcatcatcaggccagacacaagggctgaaatccccacaccgatcccaactaatgagtagattttgttataaaaagcattcaatccactttgttcttggattactgaatcattatacatattaacaagttcctttcaaatttgtttactacgattttaacatttttcgatgaaaaaatctccttttagccatctttttacgccatggttctgaagcttctttaacagcccagtatttatccaccatggtcactacgaaggattctttgtagcgaggcggggcaagggtagctccccacatgtgtttaatgatgatgtcttcttccttggcattgagatctgtaatctttcgcgcatttctcacggcgatgcggggatggatccaggcgtgactcttggtaaacttggtctcgcgccaatcatagtaaaagaggtcatgcaagagcccaccccgagccgtacttttggcatcccagccaaatttttttgccaatttataactagtatagctaacatgaatggaatgctccaaacgattggaatgaatatggtggggaatgtcggctaatttttgaaccttaggatgctggatcagatggcctacataggtcatgtattctttgtcacgatgatattgcataagataaccacctttcgttgataagctctcccaataagatctccatcaacttcttcttacaggttaagtatacttctttttctcaaaatttccttaaagaaaacatcaaaattcctgctgccactgcaacattcaaactctcggcccgacctggcataggaatatgaaccagctggtctgcttgtgccgccatttcctggctgatgccatttccttcattccccataaccagaataaactgatcggtctgagaaagctgacggtagtcaatggaagcttctgaaagcgtcgttgcgagaactgctagatgagattgcgcagctcgctccaatagttcttctcgatccagtttccagataggaatatggaaatgactgccctgcatggatcgaagggtcttgagactgtatagatctgcggaggctttcgaaagcatgacgccatcaaaacctgctgcatctgctgttcgaatcatcgtccctacattgccaggatcctgtacatcctccaaatagaggaagcgtccttgaagctgatccggaagctctggctgatccagagcgatctctgcgacaatcccttgcggagtcttcgaatctgccaagagacttaagatctccggagtcacgacggtgactttttggatgtcctctacccggtctaaataggcttctaaaacaaagacctgctgaatcttcgcttgattttctactgcttcttcaaacagatgccagccttcaatgagataagaatctgtccggtattttttttgatgtaattttttagcatttttgattacattattggatttagacgttataatattcatagaactattatagcacaaagaaaaagaagaaatcatgcctcagatagatttcttcgagtcaaggaggtcgcacatgcaaaaggtaaaaatgattgcccaaggacgggttcaaggggttggctttcgctggggagtgtacagtcttgctttagagatcggtgggattactggccgtgtctggaataatgacgacggaacggttggcattctggcccaggcagagtctagtagccaaatggccaaattcattcaagaaattcgcaaaggtcctacaccttttgcacatgtaacttatttagatgttacgctcgcaaactttgaaaactatacagactttaaaattgcaaattaagactagagaactattgtgtattttaaaaaaaaacagtagaatagaaaggtaacattttaaaaaagaaggaactatttgtgaaaaaaaataaacttgcattacttgcatcgatgggactagcttcgcttgtcttcttgtcaggatgcgtgagtgtcgatcggaaaactggaaatccgactggattgatctggaatcttcttggccgtccgatgggcgaagccatcaaattctttgccaacaaccttggcttgggctttgggatcgggattattatcgtcaccttgatcgtgcggttaatcatcttgccacttggtttgtaccaatcatggaaggcaacctaccaatctgaaaagatgaactacttaaaacctatccttgggccaatccaagagcgcatgaagaacgctagcacacaagaagaaaagctattggcgcaacaggaattaatggctgctcaacgtgaaaatggagttagcatgtttggtggagttgggtgtttgccactcttgatccaaatgccattcttctcagctctcttctttgcagctcaacacaccaaaggggtagcagatagtagcttccttggcattgctctcggcaaaccaagcttgctcttgacagcaatcgtagcagttctttactatatccaaagtatgctctctcttcatggaattgaagatgaaacccaaaaggaaagcatgcgcaaagcatcactgatgagtccgattatgatcggtgtcttctcattgatctcttcagccggagtgactctttactgggtagtcggtggggtgatccaaattatccaacaatttgtcatcaactacttgattcgtccaaatcttcgcaagcgcgtcgctgaggaatacaaaaacaatcctccaaaagcgactagtcaccgcgtgaaaaaagatgtcacacctactgcaacgacacaaatccaacacaaaccaaaaaacaaccgcaatgcaggaaaacaacgcaatagaaagtagtccaaactactaattctagcggtatacagtagcacttgaacccggaggttcaagtgcttttttgatatcgttcagtcagcaaagaattttcactctcacaaaaagattaagagcacaaaaaaacaagccctcttggagggcttgcgttttatagttacgctgttttttctacgttcaaaattttcacttggtagcttccagctggtgtctcaacagtgacaacgtcacctgtcttcttaccaatcaaagcgtgaccgattgggctttcgttagaaatctttcctgcaaaggcatctgcccctgctgaaccaacgatgctgtatacttcttcatctgtttcgccaacttcttgaactgtaacggtttttccaatcgctacttcgtctactgcaacagcgtcactatcgacgatttccgcataacggatttttgtttccaagctagagatttgaccttccacaaaagcttgttcatcttttgctgcttcgtactcagagttttctgagaggtcaccatatgaacgagcgatcttgatccgttctaccacttcaggtcgacggaccaatttcaattcttctaattcttgttccaatttttctttttctgctagggtcattgggtatgttttttctgccattattcttctctttctattatttgaatgaaaaagctgtggacgcgccacatgctttttctagtttgaacttgcttgtgtcaatttactattgacgtgttcttcaacatttttattgtgttcttcgtatgtcttagcgaagaaaacttcaccattttcgacatttgcgacaaaatacaagtaatcggtcttacttgggttcaccgccgcttcgatcgctgatactccagggttatccactgggccaggcatcaagccggtattcttataaatattataaggtgaatccagctctgtatcgatcgttgcatcttcttttaaggtcgtcttttgaccaagtttcccttcggcataaagaattgcaatattactttgcaaaggcatatcttggttcaaacggttatagaagacactcgcgatatctttgcggtcctgatccgtcgccccttctttttcaaccaaggaagcaagagtcaatacttcgtttacattgatgttcttgctctcaagtgtttcatagtatgggcttaagttttgatccattgccgcaagcatctgatcgatcatctctttcactgtggtatctttcccatagttataagttgctgggaagagataaccttctaaacggtagcgaacaccagaatccttacttggcagattcgccaagagcttaggatatttggccaccatcttctcaataaaggcatcgtcttggacagccttcaagaaatcttctttcttaaatggagtcttgcctgccttcttagtggagacatcggtggtgatagccgtcgcaatctgatcgatcgtatagccttctggaatcgtcaccttcccaagaactggagcttgaggagttttggttccctcttcctgcagtttttggatgatggtttctagatccatgctcttttgcaaattgaaataaccagatttgaaattgctatagttcttgaacttggtatagtagttaaagaactgaccatttttcacgagtccttttttctcaaggatcgcgccaatctcacgattacttgaacctgctggaatctcaaccgttacgaattctgttgcatttttatccattggcttgacagctgaatggatataggtcacagcaaagatccctgtagccacgatcacaatcagcaaaaggctgaccactgtccgcacaattcgtttagcgattttattttgtttcttttgtttttgttggcgctggttacgagaagagcgcgataagctttcctctaccggttcctgacttggttcttttttagcaggctttatacgctcacccttttcttccacagcaggagtcgcctttaccggctccactggttcttctttgggagccaacgcagattcttctacttttggaggtagtgttgcttcttcctcctctttcagtgaagaaggggtttcaatacttcgatcaggtagatcatactctttttcgatttttagaagttgctcattggcctcttctaagtctctgaggatctgctctttgaagcttaataacttctcactgtcttgtgatttatcagtcaaataattgacctccctcatcataatccttaatattatatcttaaaagatttagaaaagcaatacaaatcgctcttcttcttcaaaatacctatttaatcaagtttttcattttcccagaccagattgtaccaaacttcacccgcatattgggattctgagagaccctcattggtaaatccttgcttttcataataaggaatcaaataatcatgacaggtcaaattgatcccttggcgattatctttcaacgcaatctctttcatcgcttcaagcaaaagggttcccactcccagtccttgagcttctttagcaatggatagactcgtaatggaaataaagccctgttctaactgacttagatcttcaacctctgaaaaagaggaatcgatcaaatagcgctccagtctaacaggtccttctaaatagcctaaaatctgacctcggcactctgctacaagaaatgtcgtttgaatcttttcgatgtgatcttttaaaatctcacgcgcaatcgcttcttcttctgagaaattctcaagctcaatacgctcgatggcatccaaatcctgcagctctgcctgtctaatgtgaatcttttctttcatcatttaccccttctatcgttcccaaaccatatggacacctcgatcagactcagcttcatctcgaaatccttgctgggaaaaataagatagcaagtcttctgggcaatcgatccaaatggcttccttttccttttgaacagctagatcctttaaagcagcgatcaaaatagagccatagccttgaccttgaaaggctgctctcactgctagtcgcaatacaattaggtctccttttaaaggctggtcttctgtcgccaacaagtaagccacagcatcccccgcctgctctgcaagcaaagaaatggcttccttcgaacctagcgcttcctcaagagtggccttgtgcttcttttcttcattgtcatgaagttcttcttctagcaacagcaactgttcttgatcagctggggtgattgatcgaatcatcatcctgctttcctcatctcatactccttcagtggacagataaatttgagtctggaaccaatcgattccagactcaatcatctcttattgtacactatgtgtcaaactagataataaacgctcaaatgagtattcataggtttgaatatctcctgctcccataaagacatagactgcattatcatggtcaagaagaggagaaacattctcagctgtaataatcgctgaacgtttgacaatttttgcttccaaatcttcaactttcacatcgccgtgatcgacttcccgtgcagaaccatagatctgtgccaagtaaacagcatctgcttgattcaaggcttcagcaaattcatccaacaaggcaatggtccgtgtaaaggtatgtggttggaaaatagccacaatctctttacttgggtatttttgacgggctgcatccaaggttgcaataatttccgttggatggtgcgcaaagtcatcgatgatcactgttccattgactactttttcagtaaagcgacgtttcactccagcaaaggtcttcaaatgctcgcggactaaatctaagtcaaatcctgcaatgtaaagcaaaccaatgactgctgtggcattcatgatgttgtggcgaccaaaagttggaatatggaattgccccaaatcttctccacggaaatgaacgttgaaggttgaaccagtcgttgaacgaagcaagttgcttgccacaaaatcgttcgtctccttatcaaaaccatagtaataaattggtgctgatgaggtaatccgacgcaattctttgtcttctccgtagatgaagaggcctttgctgatttgtttggcataatcgttaaaggcattaaagacatcttccaagctcgtgaaatagtctggatggtcgaagtcaatattggtgatgatgctgtattccggatggtaaggcataaagtggcgttcatactcatctgattcaaatacaaagtatttggctgctgcagagccacgacctgtcccgtcaccaatcaaataactggtatcagtgatatttgataagacatgcgaaagcatccctgttgttgaggtttttccgtgtgctccggcaacccccatgctgacgaagtcacgcataaattcaccaaggaattcatggtagcgtttatagtttaggccatgctcatctgcataagcaatttccacattgttatctggacggaaagcattcccagcaatgaggatcttgtcgccttccaaatttttcacatcaaatggataaatttgaattcctgcttgttccaagccacgttgcgtaaagtaatacttctcaacatctgacccttgaaccgtatgtcccatttggtgaagcatgagggctaaagcactcatccctgctcctttaattccaataaaatggtatgtattagacatgttttctccttattcttgatctagatgggttaaatccaattcttgtttgattggctgtggtttcaacttgtgctgatctttattgtatatttggctagtctttaagaaatcataattgtttttcttttcagtcggttctgccacttctggttctcctgcagattcgaactctgcaaggatcaactgatcttgtcgtaatcgtttgctatatttcaataattcacccggattttccttttggaagggagccgttggctgaccaggtttccgttctgaaataaacggttttttccgcttacttgtagtagctgctggatccgttgtcagatagggggctgtgcgtttctttttcagatcttcacgcgcacgctctctcgcttcctctgcataacggttggcaggactttttttatcaatcggctctttaaaatcaggttttcttactggccgtcttttcggtaggggctcttctagtggttgatggtaaggatgcttaggtttggtgttttcagcaatcggttgccattccaaataatttttatccacatagtcgcctgtaatgttactaatcaagtctgtttcatcatacaggttcatgtggggcatctcttttaacatcaactcattatcccctacttgaggaaaatatttttctgtcatgctttcttcctttcgacactccattaattataaactattcacagaatttttcaagctattctgactgaattccaagaatctcacgaatttcctcaacagataagctggaccgtgtttccgttccatctaaaattgttgagaccaagtgtcttttagatgcttgaagttcctggattttttcttcaatcgtgccacgagtaatcatacggtaaacttcaacattttgttcctgtcccattcgatgggcacgtccaatagcctggtcttccactgcaggattccaccacaaatcgactaggatgacggtatcggctcccgtgaggttcaaaccgactcctccagccttcaaagaaatgagaaaagcattacgctcacctgcattaaaggcattggtcatttcttgacgatctttggccggagtggatcccgtgattttgaaggaggtcatgccaagctggtcaatttcctgctctaggatatccagcatgcctctaaattgagagaagatcaaaacccggtgttcgccatccttgatttgacccaaaagatctcgaaggctctccaatttcccactatctccttgatagtcttccataaagagggcgggggtatcacagatttggcgaaggcgcatgagaccagagagaatttccaccttgctccgatttagttcttcctcactagaggttcgaacccgatcttgaatttgttttaattgagccaaatagatcgttttttgactttcatccaattcattgtggtagattgtttcaatcaagtccggtaattcttggagcacttcatcttttttccgtctcatgacgaaaggtttgacaaatcgcgcaatagtctcaggactcaacttttgaaattcttttttagctgggaagagccctggaaggacaatttggaaaatagaccagagttctcccacatgattttcaatcggtgtcccagataaggcaaacacatgcggaacctcaaagccacgtaagtgttgggcaatcttggtttgggcatttttcatgacctgggcttcatctagaatcaagtactcatactgattcttctggtattcctccacatcttgacggaaagacgcgtaactagtgataactacctgtggattggttgcgatgagttcatctcggtgctgcttgagaccatagacgaccgccacctccatctgaggagcgaattttgaaaattcttgtttccaattgtagatgagactagatggagctagaatcaagattttagtttctttttttgcaacactggtcaagaaggaaatagtctgcagggttttcccaagccccatatcatccgctaaaataccaccaaaaccataatgatttaacatggagaaccatttgacccctatttcttggtaatcccttagggtcgcttggattgtcatctgagggagttggaagtcttctggatgagtcaaatcatgagctaaaattcgaaattcttctgaaaaatgaacattgtcttgatctgccaacaaatcagatagctgataagcggcaatccggcgggcttgtagtttcccacccttgctcattttcgcccgcagatctgctagggctcgactgattttcttggtttcttcatcaaagacaagaactttacctgtatggctgacaaaatagtctttttgccctactagagctttgaggacctggtccacttcggctggatccacactttcaaagtcaaaaccgatctccagtagactgccattggttttaacatcaatttttggacgctccacttgataaagatctaaaaggctatcagagagggtaacctctcctaaggcttcaaaagccgggatctgttggtgaaagaacggatagatttgctcacttgataacggacttctttgggaagaaaagtcgtctgtaaaacctgctgctagcatggttgaaaagacttcttgctccttatcgaaatcactggaataaggaagattaaggagttcctcacgcgtggtcaccacacgatcctggtattgaaagacaacatccagtaaaacagtctggtcctgtgctagatcaaaatgaaattctggagtgaaatcgtggattaaaaagctggtcggagctgttatttgccccagttttttgaactcttttaaactataggaaagctttgtttgatccgttggatcaaaatgcagtcgttttttgcgatcctgatccattggtaagtcttgaatcgccttccatagggttcgctgttggggcgtcaggtgatagaagacaccatttcgaaacaggtaaacagcagactcgacaaccttcacttgtggctcagtaatgatcaattcgtaaaaatcaccatggtcttccacctgaaaatgaaagagatcttcctccccatggacatcctgaaaatagacttcagaaaaatcatacatgctgtattgcaagaggaaggaatccaaattcattagtaattctacagcttcttcaaagagagtcggtggaaaataaagatggcgcccagcattgggaaagaaatcttgctctttcgagccactatctgtgaccaagccttgtaggaaattgatcacatcctgactaggcccatcaaattctaagtaagaaatgggttcatagtaacttttgccaattgcaaagtggccttctttctgaagggtctgcaaaaaagctagcacatctctgatcacataagaacgctcgtctggcaagcgacgaatgcgaagagtccataagaattgaccagagtattcatcctcctgcccgactgctgataagacatagcgtgttgctttcttttcgatttttggaaggacctggtctaaaaacaaacttccaaaagagaccttctcctgcgtttcttcagtcgccgtggcgtcttcttcaaggcttgtaagagctgctttcccactgtcatcattcttcaaaaaagcttccacagctgctagatgtgtacagaattttttcttttgaaagaaagcacagctacaaaaaacagcatcgtcatccaaactgtaccgcaagctttcttcttccacccgaaaatacaggtatttttcttttacttcctgaagggaaactttcccagcttcatagagaaggctcccttgtgaacgaaccttcccaggaattaattttgccatgtttaccaccttagattaatccctttattataccatatttaagaaaaaattagaaaagataattttactattaaaaggattttaacttacttttagaaaaaaactgagacagtattgtcccaacttttcacctgatttcgtaatagagttacctcaatcagctatccatgatttttctcttttaaccgtctgagcgaacaatagacagaatagataaatagagaggagaaagatcccgatagcccacagaaaaagacaaaaaacacgacctattttttaataaaatccccaacaataggatcaagagctccaagcttacgatcgaaccgagaaacaagagatacagatagattttaaataataagtacacaaacctaaagctctcatgatcttcatgagtttactctactcatccttaaaaaagcataaggaataaagaatatccggactatgaaactacgcatctgactattctccacttcattttaccagcttattaaaaaaagcaacgcttatgcgctacttttagttgttttcatagttggaagaatgagcattttatcatttgaaatatccttctccactttgatccatttgtctcgtattccctacttccgtttccgcgcaatcaaatggattggagttccttcaaaaacaaaggccttgcgaatttggttctccaagaaacgaaggtatgagaagtgcatcagttcttcttcgttaacaaagaccacaaaagttggcggcttggttgccacttgtgtcgcatagaagatcttgaggcgttttcctttatcggtcggagttggattaatggcaatggcatccataatcacatcgttcaagacagctgaaggaatccgtgtattttgactctcactgatctgtttgatcatctctggcaacttgtgcaagcgttgtttggttaaggcagagacaaaaacaatcggcgcataagaaaggtattggaattgatcacgaatgtcatcttcccactgcttcatggtatggttgtctttttcaatagtatcccatttgttgacaacaatgatcatccctttaccagcttcatgagcaaagccagcgatccgcttgtcatactcccgaatcccttcttcggcattgataaccatcaaaaccacatctgaacggtcgatggcacgcatggcacgcatgacagaatatttctcagtgttttcatagattttaccagatttgcgcataccggctgtatcgatcatggtaaattcttggccatctgcatcggtaaaatgggtatcgatggcatcccgtgtagttccagcaacagggcttgcgatgacccggtcttctccaaggatcgcattgatcaagcttgatttcccaacatttgggcgaccaatcaagctaaatttgatgatatctggattttcttcttctgtgtcattcggaagattttcgatgatggcatcgagcacatccccagttccgatcccgtggacagaggataccggtagtggctcacctagtcctaaggcataaaagtcatagatatcattgcgcatctctgggttatccaccttgttgactgcaagaatcaccggtttatgggtcttatacaagatacgagtgacatattcatccgcatccgtgatcccttctttcccagaaacgacaaagacgatcacatctgcttcgtccatagcaatttctgcctgatgcttgatttgctccataaatggggcatctacgtcatcaattccccccgtatcaatgatactaaattttcgattcaaccactcagctgttgcataaatgcggtcacgagtgactccttctacatcctcaacgatggaaatccgctcaccggcaatccggttaaagagtgtagattttccgacattgggacggcctacaatcgcaatagttggtagggccatgatttcctcttttctaatgaaaggcgagacctcggttcaagaacgcctctcttcatttcataatagtttgtgtttttctagtaattttttggtctcttcttgttcaggttgaccaaattgagctgcaaggcgctcgctccagctgtctgttgcacgcgctccagcataatctgcctgaaccttgtcataggcagtcacaactgatggatcttgttcttggtattcttcttcaaaagcaacctgctccaatggcaaacgtggtttcactgcatgctgctgattaggtactccgagagcaatcccaaaaacaggataggtatagtctggcagacggaagagttctgcgacttcttctgaacagtagcgcaacatgccgataatcactccaccatagccgagactttcagctgctaatagcgtattttgagctgctagagccgcatccactgaggtgatcagtaagttgtccaccccttcaggatggaaatcctgctcatgaagtttgacagctttttcagcgcggtttaaatctccaacaaagaggagaaagacatctgattggcgaatcgcttcttgaggaagcaagtcgtaaagagcttctttcttctccttgcttttgaccacaatcacagaataagactgaaagtttttccaacttgatgccatctgcccagctgataaaatttccttgaggtcagcttctttgatggcttcttccttaaaacggcgaacagaaaaatgagatttcattaaacggatggtttcattcatcggcgattgactccttccagatggatttccttggctaaaaattttacgcgctccatgacacgtttggcctgccaggtttcatctccattacgcgaagttgcaaaatgacgttccaactcttcaaaattaaagttagaagtaaagaaggttgggagattttcctgcattcggtgctgcaaaatcacctgtaagatttcatctcgcacccaggctgacatctgttccgcaccgatatcatcgagaattaaaatttcggcttttttcacctgatcgacggtttctttgaccaagcctgaactgatggcatttttaacatcgatcgcaaaacttggaaaatgaagtagggtagtagaggcctggcgtttttcggataaatcatgagccaaggctgccatcatgtagctctttcctactccaaaatcaccatagaggtagatccccttttgatattccggatagttggccacaaaattggctaattcttcaaaggcctcaaatcgtcccttatcatcgagctctaccttagctagactcgcctctttcaaggttgaagggagattgatcaagttgagacgttggttgatcgcagctcgtttttgggcttcgattaactctggtgtttcctcataagcgacatccgcatagccctcattcatggtgaggatgggtttataacctttggcaatataatctggatctcccaataagaaacggttgcgttcactaatgtattgattaaattttgaaatactccgtcgaatttcttgttcagacaaagactggtccttgataaaggcagctacttcttggtctgccaagatctgtgcgaccaaatcctcatagttaaattgacgcgcacggttcatgtgagacatggtttgacctacactttccatctactcacctccttgattcagtttttctaacagacgttgtttctctttagcaagatccaccttttctgcttggctggtttgattttgataatttggttgactccacttgggaacattgctgtgcttgcccttggctgatgtaggactcgtccccttgtttccttgacccttagcttgttcctggcgttctcgaacttttaaaatcgccagttctgcactgttgaccccttgataagaaaaatcatttcctaccttcaaagcatacttttcattgagattagcagactgggtcttattaaaggtcaacaataagatgatattgatcacctcatctagtaagcctagatcagctaacttggataaagtcttgcgttcgctctgcgtaatggtcgcattgcgcgccttcttaatctccgctagaaattgtaggctggattttgccttagcttccctcagaatagtttcttcctgacggctataggacatgcggggttgctcttggctagcctgagccaacttttgcttcattctctttggagagacaatccggtctacagccgtttcttttgctaggagataggtttcataccaggtccattgttgctcttctgcgatggcaaagagggctagggttgcctctccttcatccgcaaaacgaagcccatcacgccccatcattcgcttaaacatctccatatcaaactgctgtttcttgcttggaagaacggtcgtctccccagcatctagtccaaagacttgcgagaaggaaacttgccgtctagtccctaaagagcgtgctgggagcaaatcctccacggccttttccccaatcattttttcaagcaagcgtttaaaaacagcattcgaaaaaaattgttctgaggcaagaggagcatgtaattggatggcgatcccaacttcttcctcatagagatcgatcaaccccatagcaattaagcgatcaaaggctagtagcaactgtggaaatcctatattcaagtgattgaggatttgagcaagtaaatattgtttttcaccctgatcataagaggccagcagataacgataaactgctaccgtttccgtctccaaaataggcaggtaatactgctccaatgcagcccctgccggtggaagaagattattttttaaaaatgcgaaaggcgtattgggcttcatctatttttcctttttcttcttggttcccttcgtaatttgtttcaagagggtttctaactcaccgacatccttgaaactccggtaaacactagcaaaacggacataggtgatctcatctagatctgctaactcatccatgaccaacgaaccaatatactcactgttgatttcattatcactttggctgcgaaccttttgctctattcggtttacaatttcttcgatttcgtcactagaaacaggccgtttttgagccgagcggataataccgttaaagattttatcacgagaaaattgctcgcgtgtcccatcctttttgacaaccactagggtccgctcttccactcgctcgtaggtagtaaagcgataatggcactcttcgcattccctgcgacgacggatggtgttcccatcttcagcttgtcgactatccaccacactagacttacttccaccacattttggacaacgcatttgctacctccttaaactgttttaacacttcattttaccataaattgaatcgtaaagaaagcagaagaacaggagaatcccctatgcttgctcctcattgatccataaaaaagagtcgaaggacgattgaataaaatcgttttcctttcgactctccgttaatattaaagtgacaattcagcttctaagccatagtgatcactgacatgggctttgttttgaccatcaaaaatgacatgtagacgctggatgtcccattctggacttgcaaagacgtaatcgattcgcaatggaacttgattgtccgtccagccatcgattccagggcctacagtataagtcccctttgtttctttggcttcgataaagctatcttgaagcttaagggaactggatagaatcgtttcatacccttcttgaccagcaggattattgaaatcaccagctagaataaagggtttgcctacttggctgaagtagttctcaatgcgtggccactcaaattggaaacctttgtcccaccaagaaagatggacgctggcaacagcaatctctttgccatccacactcgtatgggcgacggccactcgacgagtatggtagtccgttggatcatccatattggataccaaaatctcatccgccttcaagggttgacgcgaaagaacagctacaccctcattgaggtgatcatagccaatatggttgtaggcccaagtccaataatagtggagtccttgagcagctaactcttctaccaatacgcgaacaaagtgatccttgtgaatcgctacagatgatggcaaagcttgataatactcatctgtttcgactgtttctgaggccatttcttgattgacctcttggaaacagatcacatcatattgcgcttctaaaatttgttccttgagggtttcaaatttttgctgagcattctcttccatccaactatgggaatttaatgttaaaaatttcatcccctgatttctccttctctccaaatcaagaaacggcaagaggccgggtgcactgccccaacctcattttctttgccgacgtctcttataattctactgttgcaactggcgcatttgcagccaatttaccagtatgttcgaccttaacggatttaatcgcatctgcatttgtgaagacaacaattgttgatgtttcacgacctgcttcacggatcgcatcaaggtctgcttccaccaagaggtctccagcggccactgtttgaccttcagaaactttaacctcgaacggttttccttcaagactaacagtatctagaccgatgtgaaccaagacttccaaaccattatctgttaccaaaccaagggcatgtttggttgggaagacgctggtaactttaccagcaactggtgaaacgatgtggccattttcaggctcaactgcaaatccgtctcccatcattttttgtgagaatacaggatcttttacatcttcgatgttaatcacttcaccatctgcaacagagtgcacttcatcagttacccctttaaaggttgcttcagctttttgaactgctgtcatttggctaggaagtgtttcaggaatgacttcacctgaatcaagaacgtcttggatatcagacttcaatacgtcagctttaggtccgtagatcgcttggacaccttgtcctttcatgacaagacccatagcgccttcagctttccattgttcttctgttccgactttttcagcgtccttaacggttacacgaagacgagtcatacatgcgtcaacatctacgatattggcacgtccaccaagaaggttgataatgttaatgacttgtgagcttgctgagcttgtagcagcacctgctgctgcaccatctcctgcaggggcatcatcattttgttcatagttaccgttacgtcctggagtcgcataattgaatttcttaatcatgaagttagcaatgaagtacatgataaatccaaagaggactgttacccatacaaagttaaagatatctagtgccaaaccagcgttgatggccattggtgtacgtgtcaagaactcgattgaaccgaatgagtgaacacgaaggtgaaccaagtcagccattgcaaaggcagcaccttgaacaaaggcgtagatcaagtacaatggtgttgcaatgaacatgaacatgtattcaattggttcagtaacacctgtcaagaatgtagcaagggcagttgcaaaaagcatccctttgtatttttctttcttatctgggtccacattgcgatagatagcaactacaacccccatcaagataccaaatgatccaatcatttgaccaactttgaaacgagctggtgtgtacgcatgaagcaagtgttggtattggctaggatctgccttcttcaagttaacaaggtctgttacccaagctaaccaaagtggatcttgtccaaatacagttgttcctttggcagcacctgtaagaacttggtagctaccacccaattgagtatagttgattggaatggtcaacatgtggtgaagaccaaacggcaagagaagacgttccaaggtaccaaacaagaatggtgccaatactggagctgttgattgtgagttggcgatccagacaccgaatccattaattcctgattgaaccactggccacaaggctgccaaaaccaaggctgtaagagctgaacgaacgataacaacgaatgggacaaagcgcttcccgttaaagaaagaaagggcttctggaagtttacggtagttatagtatttattgaaagcagttgctccaacaaaacctgagataatccctacaaacacccccatattaagtgccggtgcttcaaggacactaatgaagtagtctgcaactttaattgatccacctaagatcgtatgaacggtagcatccttatcagccaacattgcagatgtaactccaaaaactgcaccggtaatacggttaatcaagatgaaagagagaccagccgcaaaggcacccccagcacgctctttggcccagctaccaccgatagcgagtgcaaagaggatgtgaaggttaccgataaccccccaaccgatttgttcgagaatcccacctgtaataacaagtggagataaattcgggttgatcatagggattgatttcccgattgaaatcatcaacccagcagctggcatgacagcgataacgaccatcaaggccttaccaaacttctgccagaattcaaagctaaataaacttttgaatgatcctttattcatcattcaacctccttatattgtttaaggcttttgtttttaagaaaacgtttgcgcttaatttgtttctagtataccacattttaaaaatttgtaaagccttacattcatttttttctctaaattttatctttttttatctttttttagccaaatcctttttaaaacccatcctttccaaacgcaaacgtttcccttgggtcataaaaatattcgaaccctctaagggttcgaatattttattctaatgtgtcttgcatggcatagccaatcccacgaacggtcttaatatagcttttttgaccgggtagatcaattttcccacggagataacggatatagacgtccacaatattagtctcacctgtactctcgtacttccagacactctccaataactgatctcgtgtcaccacccctttgcttcccatcagagtcgctaagagatcatactctctgcgggttaaactaatcatgtctttcccacgatagacggtatggtgttccacatcaatgcgcaaattgcggtatgatgttgggattttcatctggctacaatgttggtcaatataatcacgtcctctaaaaatggctgtgatcttatctaccaaatcgctgataataaagggtttgaccatataggaaacggcaaagcgctgaatactctctttgtgctcagcaattttttcgcggctatccaaaacaatcaaaacagaagctggacgaatccgactgatttcctctgcgaatgtttcaccagacatatctgacaaatcgtaattaaacaagatcagatcatatttggtcgcagcaatcaaggccagacccgcttttccatcctcgaccacatcaacttgatacccctctttttgaagttccaaatcaatgaagcgagcgattttcttctcattttctactagtagaactcgtttgaccatagagcaagattatttttcgtcgtaccaagaatagtggaaggtaccttctttgtctttacgttggtatgtgtgagcaccaaagtagtcacgttgtgcttggatcaagttcgctggaaggtccgctgaacggtagctatcgaagtaagtgatggctgctgagaaggttggtacaggtacacctgcttgaacagcaagagctacaatgtcacgaactgattgttggtacttagcagtgacatccaagaagtactcatccaatagaaggttagcaagatctgcatcgcggttgtatgcatctgtgatcttttgcaagaaacgagaacggatgatacatccatcgcgccagatagatgcgatgtccgcaaatggcaagttccaattgttttctttagaagcgacgcgcaattgagcaaaaccttgtgcgtatgagatgatttttgagaagtaaagggcttgacggattttttcaatcaattcagccttatctccttcaaatttgaatgcagctggttttggaagaaccttgcttgcatgaacacgttcttctttgtaggcagagatgtaacgggcaaatactgactcagtgatgagtgacaatggcacaccaaggtcaagcgctgattggctagtccatttaccagttcctttgtttcctgcagcgtccaagatgtagtctacgattggtccatcttgaccttcgtcgtctttgcgtttcaagatatccgcagtgatttcgatcaagtagctgtccaattcacccttgttccattcagtgaagatttcagccatgtcttctgcagaaaggccaagcaagtgttgcatgaggtcatagctttctgcgatcaattgcatatccccgtactcgatcccgttgtggaccattttcacgtagtgaccagctccatcaggaccgatgtaagtcacacatggttttccatcttcaggcgcttttgcagagatttcttcaagaacgtcagctaccaagtcatatgcttctttttgtccaccaggcatgatagaaggaccttcaagggcacctttttcaccaccagatacacctgtaccgataaagttgatccctgagttcgccaactcttcgttacgacggatagtatctttatagaaagtgtttcctccgtcgatcaagatatcacctttatccaagtgtggaagaagggcttggatggttgcgtctgtaccaggtcctgcttgaaccataagcatgatacgacgtggtttttcgattgagtttacgaagctttcgatatcatagcttggcacaaagtttttatcaggatggcaagcaatcacatcttctgttttttctttactacggttaaaaatggcaactgtgtagccacgagattcgatattaagggcaaggttacgacccattacggccataccaacaacaccaaagtttgctttagtcatgtgacactcctctttatagtttgcctttattctaccatttttcctcctcaaaagaaagcagaaaatagcttcccgccttctccaagagggagaagatcatgcaagtcatttgatcttaaaaacaaaagtgcccgagaaacagttctcagacacttcttgatgaatggcattattcttctttagaagctaactcctctgcttcaatgaccggttgttctccttctttgagtttattgaccgtcatattgaccccaagggctcctgctagcaattgacgaatatcaaatccggctccttgagagacttggtcgatactttgcataatatcgcccaccatcttagaagcattgccttccccgtacatggtgatcttatcaaccttggttaatggttctgcgacagcacgcgcaatttcaggcaacttgtcaacgaccatttcagtaatggctgcttcttgcattttcttcatcgcttcggccttttggtccaaacctttggcttcggcttccagtttcaagcgaatagcttcagcctcggcacgacctttggcttcaatagcttcggcctcttgcaattgggcaaatttctcagcttcggcttgggctttccgagcttcggcttctttttgtgtttcgaagagttcagcttcggccttgcgttggcgttcgatcaattctgcttctgcagcttgttgacgcgcatatttttcagcttcagcttgtttgcggatgttggcatccaattcttgctcacgaaccttaacttcgcgctctttgacttccgcttctttttcctgtttcatgatattggcttcggctgccacgcgctcttgttcacgacgttgcacttctgcctcaattcctttagcggcatctgcttttgcttgggcaatgtctgcttcttgcttgagggctgcttgtttgagtttcagttcattttgtttttgcgcaatttcaagatcggcagcgacgcgtttgtcgttagccaatttatcttgttctgcttcgacttccttgcgttcacgttctgctttggctttggcaatcaaggcatctttcttaatggtttcaacattttcaatcccaaggttatcgatgactcccccttcatcagagaaggattgaaccgtaaaggcgatgacttctagacccattttagccaagtctggcgctacgttgtcttgcacttttgaggcaaactcttgacggtcattgaccatcttacggagctccatctgaccgatcacttcccgcaagtttccttccaagacatcttggacagaattggaaatatctgtcgtattccagttcaagaagttttctgcagcccgggcaatcatttcatcggttgtaccaatttttaatttaacagctgcatcggcacggacgttaatgaagtccagtgttgggactgcttctgacgtccgaacatctgtcgagaattgctcaatatcaagataagagcgttgttcgacaaagggaatcataaagccagctttcccacgcaagtgacgttgcttccgaagaccggtaatgaccacgacttcgttgggtttagcgttcacataacctttaacaagcaaaatcaaaataataactgcgactattaggccggtaatcaaccaacctggaataaataaattatccatactttttctcctttttagaggtctcccctctgttatttattaatcctagtatatcaaaagaaggcctttcctcaaagaaaagacctgtatttatgtctaaatttatcaaatgtaatctctagcttattcttcgtcaaacaagccatttagaccagcgaaaggactgttttcttctttcttaatcgcttgagcggcttggtattcttcttcggataggattttccaatcattgccttcgataaaaccttgtccagcctcttcttctggagtgagaaccttgaggggaatattgagcaggatattatccgctacactctcactcaggtcaatcttcccaccttcgattggaaggatcaagtcttcctctagggcctcgatatctgcgtcagactgtacatcctccgcaaacacttctgttacaggatagctttcttgaagctcgacaggctccatgcttcggctagaggccaaaacgatggtatagctcaactggtaatccaagacatagaggcctgtatcataggctactcgtcctgttgctgtcacattctttaaatcaagaatttctggattacgcttttgcaattctttgagcaaatccaactcttgatcaaaggctagtccttcaggatttttacggatttcttgtgtaaataggttcattcttttgtcctcaaatcttctagatactactagtatatcatgaagctgcccctcaaccaagaagtctcctcaaaaatttgttataatcatgaaaaaagatacagtaactaggccaattggtgttgtacacaaggtcccaccatctcttggacaaaagagggtcactggctagggcattgttagatagaggagaattcatgaaagaaatcggagctgtttttcggcaaatacgtgaaagtcgccacatctctctagaggaggctacgggtggcgaattttcgcgctccatgctatctcgatttgaaagaggagaaaatgacctgacgacgcaacggttttttcaggctttgcaacagatcaaaaccagcctcagtgagttttctcatctagcaggaatcgatcagaactcctttatccccaaattgttgaaagagcactatgaaaacatgagcttggaacacgatcaagccttgtaccaaagctaccagcaagcctatcagaaatatcagaaaaaagaagacttcttagccagcattattctcaaggccaaaatacttggcttctatcctgaggtagagttggctgctagccaagaggaactagatttcctctatgactacctcttctctgtcatggtctggggaaattttgagttaagcctattttcactgacctctcctcttttctctagtcagctctatcgacaatacacagaggagttggtccaacgggaggatttcaagcttctcctagattcctctcgtcctgccatcaattctattttccttaatggcttttttctggccattagttcaaatgaatttgaagatgcatgtttttttgaccacctaattaacgaccacttttactctgagaacgaagcctaccttcggacggtttatctctacgccaaaggagaatttctctatcgaaagggagaaaaagaaatcggtcttgaaaagatggaacaggccatccaggttctctctattctggattgtaaggacagtgccaactactacaaacagggcctgcaagaactgatcaataaatcctaaaaactcacagatctactctgtgagtttttgttgaaaatatgcaacattaattttttcttgctttttaggtttacaataggatcatcaagtaaagaaagaaggttcttcccatgatgaccaaactaaaaaaccacttcctccgctttcttctctcacataccagcgtttatctgaaggatcaggaacttcttctctctgatgatgagaaactagacctcttcaaacagatcgttcgatctatcaaacaagtcctagcaactgatcacgtgaaggaggaaggcttatgaaactcttagctcgtaataaaatttttgccttactcagcctttctcgctttttgaatacccttggtgctgccatctacaatctggtctttgtggtctttgctgccagtatgccgcaaccgagcctggcagttggcattgccaatctcattgtatttattcctagcctctttaccatttttgttggtatgaaggctgaccgcacgaagaaaaaagctaactggttgatccgcattggctatcttcaagccatcctcttcatccttattgctctcatgaccaagattccgggttacctagccttttcgattgtttgctttttaaacattgtttcagattgtttgagtgattatcgcggaggcttgcaactccccatcatgaaaaagaacatcctcgacgaggatttgatggaggcctattccttcaaccaactgcttagcatggtctgttcgatttctggacaagctctaggagtttggctgttagctatcagccatcaaaattttgccctggtcgcttcgatcaatgccgtgacttttctcctgtcttccacttgtctcctgatgagaaaaaagcagctgacacatgctcccgtcattgagcccaaaagtaagaaatctttggtacacgattgccaagagatgtaccagaacgcaaaaagtatttttgcagatgaggaggttcaccactttggcaagttgctcttctcattggttctcatcaatgccctagggggatccatctctggtatctacaatttgcaactgcttcactcccccttctttcagttgagttttagccaatccctcttgatcttagaggctgtgactattttaagcatggtctgggctagcttgacaccccatgactatttttccaaacaatcgctccatcatatcctcctgtggatcgcaggtgggctgaccatgcttgggctcacaaatatcctggtacactgggacattctttctcttctactcatcactttccttggttatcttgtagcaaaaatcaacccaaaagtttccagtcttttaatgagcaaattgcctgctgaaaaattagcttctacctctagctttttgggactgatggtcagctttgccatgccacttgggacagctctcttttctagtctagctatctggagccttcccctagcttgggggacctttgccatgcttggtttcactaccctcctcttaacaaccaaataaaaagtccaccgtttggtggattgagcttaaagacaaagttatcttttatacaattctattaacttctataaagataaatactttttattctttagagttattcaatcatctactgaaactttccgccgtgagaaaagtgctagaaacaagttgtttctagcactagggagttttgggagtaaaacagtatgggaaactgttttagcctgagcctggaaattaaagagcgagggggttcaaaacgaattgaacacgggctgcggattgtgtcaaaataagaagttctcctagaatcgaaagattctgcgtcaaacttcctattttgactttatccgcagacgccctttgtatcgtaatttagtcatggaacttcatagaagttcgctgacgtccgtactcacctaaggaaaggttctaagatgatggtgtcttcaatctgaatccaccgtttggtggattttttttacatttttcttaggcgagccacccgctcagcaatgggtgggtgggtataaaagagcttttgaaaaccggattcctttttgggatcgttgataaagagagcactactggcactatcaacttctcgctgcatgggtgcactatgatccagtttcaaaagagcattgatcatcccttgaggattccgtgtcaattcgacacttgaagcatccgctagaaactcccgttgacgagaaatggctaactgtaccaaggtcgccgctaacggagctaatacgatggcaatcaaggaaaggatcagaataataatttctaaaccactgcctccttctcgatcatcatcccgtctacggccaccgccccaccacatcatccggccaccaatgcttgatagcatcgtgatggcgctggcaagagcaactgcaatagtggagatgcggatatcgtaattgcgaatatggctaacttcgtgtccaataactccctccaattcctcacgattcatcacagctagaagacctgtcgttgctgcaacagccgcattttgaggattggaccctgtcgcaaatgcattcatggacggatcgtctacaatatagacacggggcataggaatctgagccaccatggccatgtcttggacaacatggtaaagttgaggagcttgatcttctgtcacctcgcgtgcaccattcattcgcatcacaacttccgttgattgaaaaatcatgctaaaggcatagatgccaccaataatcaaagcaaggatgacgccaccaagagaggagcctaaccagaggtagccgacggctgctccgatgagggccaagagtatgaaaaaagcaataaggagaatccaggttctccttttattgcttgcaatttggtcaaacagcatattagtctcctaatccgctaaagtccacctttggtactgctttttcttcttcaggcacttgaaggaattcggcttgtttgaagccaaacattccagcaattacatttgttgggaaagtttccaatttcacattgtagttgcttgtcacactgttgtataattgacgggcataagaaattttattttctgtattggtcaattcttcttgcaattgcatgaagttggtgttagccttcaaatctgggtagttttcagcaaccgcaaagatgcctgcaacttgacgtgaaagagcatcactggctgccattgcttctgcaggtgaagatgcttgagctacttgttggcgaagttgagtgaccttagcaagtgtatctccttcgtacttggcataccctttaaccgtttcgatcaagtttggaatcaagtcattccgacgtttcaattgtacatcgatttgactccaagcttcgcgagtttgcatccgacttttcactaaaccgttgtaaactcctactaccatcaacacaaggaccacaaggatcccaagaataatccaaatcattttattgaattcctttcatttctttctaccagtatatcaaatttctcttattttgtggtaaaattatcttatgaaaccagaagaattttatacccatttagccgatttcggcttcccattaactgatcgacaaaaagaacaatacgaacgctatttcgagctcctcgtggaatggaatgagaaaattaatctcaccgctatcaccgaaaaagacgaggtctatatcaagcatttctatgattcaatcgcccccatcttgcaggggttgatcgaaaaccaacccatccgtcttttggatatcggagctggtgcaggctttccaagtcttccaatgaagatccttttccctgagttggatgtgaccatcattgattccctcaataagcggatcaactttctccacttactagctgaagagttaggcttgagcggagttcatttctaccatggacgagctgaagactttgcgcaagacaaggccttccgtgctcaatttgacctcgtaactgcgcgcgccgttgctcggatgcaggtcctttctgagctgaccattccttatttgaaagtaggggggcgcctcctcgcacttaaagctagcaatgctccagaagagttggaggaagccaaaaacgccctcaacctgctatttagtaaggttgaagacaatctacagtatgaattgccaaatggggatcctcgctacatcactattgtggagaagaaaaaagaaacacccaacaaatacccaagaaaagcaggcttgcccaataagcggcctttgtaataagatacaaagggccaagcggataaagtcaaaaaagaggctgggacaaaagtcctagcctctcaattgtctttggattgtcgagcaagacgcagtggtttagtgggctctactacgctgattccatcagcttttacagccctactcaactgtgcggaggtgggacgacgaaatcgaattctaacgaattaccgatttctgtcccactctctttttagttttgtgcgagttctgctcttagtacttggtactgttcctgagtcagatgaactcccttacttgcaacaatctgactagagactttattggcaaagcttaaggcttgcgcgatatctaagccttctaatcgggctgacagaaaagctccgacatggctatccccagcacctactgtatcaacgacttctgctgggaaaccgtccgcctcataccagttgccatcataggcaaccgctcctttttcccccaaggtgacaatgactaattgccccgttctctgatacaaacgttcgatggctggctggatctctctacacccagaaaaagccagtgcttcagcctcattaacatggagaatcggatgcagatcataaattgcttccagtcgatctttgggaatcataagtccgcgtggtcctggtgcgaaaatcacctgaccttctaattgcgaaacagactgcaccaatgcaagaccggttggctcctcgacttcaagaccacacaagtagatgtaatcaaatcgatctgtctcgatctcttttagccactctgcttggaagctatactccactccgtgatctgataagaaggtcctctcaccatcagactctacgaagcagtaacagcaaccattggtcccctctaacgagatggaagaagaaattcctaatcggttcagctctctccgaataaaatcaccatacatcccagaaccaacaggcgagacaaactggtagggttgcgacaaaaaatgaaggatattaacaacattaaaggcacaacctcccacagaccattgctggtgatcaatatgggcatctccttcacgactcggcaaacgatccaagtaaatcatcacatcacaaactgtagaaccaataattaaggcagctgtcatctttttctccttactttgccttctattataccagaggaaagataaaaaacaaccaaccccatgtggagtggttgcttctctttttagtcacgataaacaggttgagggccaaaggtttgggaaaccggcatgatttcaatccgattgacattgacatgcttgggctgttggatcaaccaagctacggtgttggcaatgtcttccggctgaatggcatgggcatctcgatagagggcttctacccgtttttcatcccctttaaagcgaacagaagagaactccgttccttcgcaaagaccgggttcaatattgctgacacgaatcttcttgccagctagatctgcccgaagattgagggagaattgcttgacaaaggccttggatgccccgtaaacattggcccctggataaggtacagttcctgctgtagagcccaaattaataatatagccatcatttcgttccaccatctggggcaagattttccttgtcagataggtcaggccgacaatattggtctgaatcatggtcagccagtctgcgacctctgcttcataagctggggcgaggcctagagccaagccagcattattgaccaaaacatccactctctcccaagcttttggcaaactggcaagtgcatgatctacctgagaaagatccgtcacatccatttgcaggggataaaaggtttctcccaactcttcttggagggcctgtaatttatcgatgcgtctagctgatccgatcacacggtatccatctgctactaagcgacggcaaatcgcttgaccaaaaccagctgaagctcctgttactaaaatcgtttctgacatgtcattacctccatggattgtaaaaacgtccctgattgagaaagatcaggacaatactcaaaaccagaacagctaaggctgatagaatcatcccataatctttcatttccatggcttgatgagaataccaggtccgctttttatttttaccaaagcgacgcagttccatggctgtagaaatactgtcaattcgttcaagtgagctaaagattaagggggagataatttgcaaattgcctttgatccgctggatcagcttggcctttttggacaactctacccctctggcttcctgagacaatttaatcgtttgatattcttcttgtacgtcaggaatgtaacgcagagtcaagctaacagaataggcaatcttgtaggatacgccaatttggttgaggcttgaagcaaactgactaggatgggtcgtcatcaaaaaaatcaaggctagaggtatggtacagacatacttaagagctagattaaaaagataaaagagttcctgcaaggtgatactataggagccccaccccttcatcagtactgtctttgccccgtaaatctctacaccatactggggggcaaagagatagaccatgacaacatttaacagtgcaaaaacaaaagcaaatgcaagtacaaatgaaatatctcgaaatcgaatacgagctgtagagaataaaagcaaggcgcccacaccaattcctagaaggagccgggtatcataactcaacatggccgcaagagatacaaaaagaagaaagagtaacttactcgcacctgaaaggcgatgaagaaaactcgtcccctcatggtagccgactaatcgatgcttcatgacctactcctttctgttgcatataaaactgcgttagcgccaagggatccattcctaatcgattggctaaggcaaaaatcgaagtctctttgagattagcctcttgtaaaatatccggatgagtgaacagctctgcaggtgagagatctgctagaatttgcccatctgatactacaagtgcacgatcagaataatccaacatcagttgcatatcatgggtaatcatgacaatggtatggcctttttcttgcaagctatctaaaaattccatgatttcagtgtaattgcgttggtcctgacctgctgtcggctcgtccaagaccaaaatttctggtcctaaaactagtatagaggcaatggtcacccgtttcttttgcccatatgagagagcagaaatcggccatttacgaaactcataaagaccacaagttttcagtgcttgatagacacgctccttaatatcttcttccgatatcccccgcaagcgcaaacctagagcgacttcatcaaaaatcatattgctcgaaatcatttgattggggttttgcaggacatagccgactcgctctgcccgttccttgacactctcttgcttgatatcttcacctctagaggtgtattgcccttctgtagtaatgaatccacagatggctttcgcaagagttgatttccctgccccattcttcccgacaatcgctaagcgctgccccttaggtatactgagggaaatattttttaagatcggatgatccttttgataagcaaaggaaatctgctccaacttcaatagttcttccgtctcaccagttttagtaaaggtcgcttctggaatggaacgattcacaccagtaagttcgatatcttctagacgatctagatgctccaattgatcgatatcctgaccaatctggcgaagagttgttaaataaagaggttctcgaatcccattttcagctagcagtgtcgtcctcaacaactcatctggttgaccattaaagagaacttgtccttgattgatcaagataacccgatcaacaggacggtagagtacatcctctaaacggtgttcgataataatggtggtcgtcccctgttcttcatgaatctgatcaatcagatcaataatatcctgacccgacttgggatctagattagccagtggctcatcaaaaaggaggatcggactttcgtcaatcagtacacctgctaagctcactcgctgtttttgcccaccggacaaatcttgtggccgatgatccaagagcttcatcaaatctaagcgttctgcccaactctgcacacgctctttcatcgttcccagatccaccatgtcattttcaagggcaaaagccaagtcttctgcgacactcaaaccgataaactggccgtctgtatcttgcaaaaccgtactgaccaaatgagatttctcataaatactgagatcaaaggcttctttcccctgaatgaggaattgtccactactggttcccttatagatattggggataatcccatttaagcactggccaatggttgacttcccagaaccagatggcccaacaatcagaaccttttcccccttataaatggttaagttgagattttttaaagttggctcagactgtgccttgtattggaaggaaaaatccttcagttcaatcattgcttctttcatttagtttgccttttcccaaaagagcgcaaattggatggccaaatccgcgattcgatccttgctatctaaatcctcatgactagataaggttcggatatcccatttttcttccgagaggtggtctgctgcgtagaagaaatggcagagctcaaagcccctataagctgctaaggctgccactgccgaacattccatatccacacagatggctcctgcttcctttcgtcgcttcatcttgtcgatggtttcccggtagggtgcatctgtcgtccacacttttcctgactgataagaaaccttgtgactgtccagaaaggcttggaagagagggagggttttcttgtttacttccacttcatcactagctggcagatagtggtagctagtcccctcgtcgcgaagagcagccgttggaataatgatggaggttgcttcgatatcacggtctaaaaccccacaggtcccaaaaagcaccagtttttccatcccaaattgaatcaaatcctctataatccccacacaggaagcagccccaacgggtgtattaaaggcagcaatttgttggtctccaatagtgatcccatagaccacgacttcaaaattggccatggaggttcttgcaatgacctcatggtcataattctcaaggagacgagcaaaagttactcttgaaaagcaagagatgactactttgggaaatccttcaattggttggtgtaagtcttgtggattgataatggcctgtcgattggcatcaaattcttctaacagcatttcgtgcacctctttcattctacttctaggcccctattataccataattagcctagtcattggtttttgatcaaaggaaggagtataaaaaagaaccgttcccaaagttagatttttctgatctaactttggaagtacagttccctacgatattgttacttgttttccaactgcgctaattctagcaagcgttctttggacaattttttgatttcaatttgactagcatctagcagctggtattcatctggctctagcgcttctataagtttcttcagagcaagagagccaattggatggtaattttctggcttatccggatctccatcgatcgcaaccaatagaactcgccaatcaatgatacccgctaagcccacaatttctacatattctgcaggaacatgtggcacgcttggcaagaccgtatccgtatcttctgtcaagctatagctggctaagaaggctcctgtctcctcctgttgataaaaacggacttgactgaaataagctgcactatattgaatcttcttgataaaggcagagtaggcttctagtggatggacatggttcaagacttcctgcactgtatcccgatccaaatagaccggatgagcgaagccttgtacttcaaactcttttagatctttttctttcgtcaaattacccagcgtttctaggataacgacttcataatcaaaatggaaaatagaatctggagtatagctcacgccgtcgctagccacaatctccgttcctaatacttctcctaggcgactaagccatcgaagggctaactgccaatcttcttctatcgcaaaagaaggcacctgaatctgataagactcttcctcatcaaaatagcgtaactgcagaggaagaccgctcttgccaaatacgatacagttcaagccttcaaaatcatttaagggacgatgaagggtggcaggatcatagttgtaggttgttaacccctccactaatttaagaacttcctgtgctgcgagtactttctgatagccaaataagctctttttatttttgattgaaaacacgatactcatttgttttctcctttgtgaaatcgcttacctaaagtatagcacaattttcaatcaatttccatataaaaaacagcctgagttttcagactgcttgtttccattatgcaggtgctccatcaagcgtctcaccgataatctctaaacgctcagcaacctctgcttgtgacaagttgtgttcttctacatagcgattgcgagggtgaacccggcactcatgtgagcagccacggaggtacttgtcttcgttttcttctgaggtcaagatgcgacggttacagaaaggatttccacagttgacatagcgttcgcatggtgttccatcaaaccagtcttttccgacaatgcttggatcgacatggttgacatcgactgcaatccgctcgtcaaagacgtacattttcccatcccacagttcgccttgaacttctgggtcttttccgtaagtcgcgataccaccgtgcaattgaccaacatctttgtagccttcacgcaccatccaacccgagaatttctcacaacggactccaccagtacagtagacgacaacacgcttgtccatgaatttttccttgttatcacggacccattgcggcaattcacggaaattgcggatgtctggacgaatagccccacggaagtgaccaagatcgtactcgtagtcattccgagtatcaaggacaacggtatcttcgtcgagaagagcttctttaaactcttttggagacaaataagcacctgtcgtttcaaggggattgatatcgttatcgaagttatcatcttctaaaccaaggtggacaatctctttcttataacgtacaaacatcttcttgaaagcttgctcttcttcctcgtcaattttgaaccagaggtcttccatacctggaaggctgtgaacgtagtccatgtatttttgtgttgtttcgtagtcaccagaaacagttccattgattccttcgtcagcgactaggatacgtcctttgaggccgattgatttacagaaggccaagtggtcggctgcaaattgttctgcattttcaatgggggtatagaggtagtagagtaaaacacgaataggttttgccataagattctcttttctaagattaaattatcagaatttttcattcaactataccagtatactcccccaagaaagcgaatgcaatttatttgaccgaaaaataaaagcctggggttccagacttttttacgacaaaaataaggtttcaactaattactcttctttttccaactgatccagataggcttcatagcgttttttctcaacttttgctaggagcatcaaaaggaaattcatcccccatacaatcggaagattcaggagaaatgtgatcggaagcaccagcaagaattttgaatggaagggatttgagtgatagacagcctggtttaattgaaaattttgagcccagataaacaaggaaagaacaagggttactgctacaattcccatcacatttagatagctataattgataaatctcacacccaatcgttgacaacgcaccgaataataaaatcctgagacgatgagtaaggctaccaccatgattggactgagccccaccttagatgtaaaaatggatcccacactaaaaacagttaaggcaaggaaaagaaaaccagctgtctcagcaccagccttattagctaggccttcttctcgttcatctatgatttgtttgttcagcaattgtaatctcatctcttcctccttattcttcatcctctaattctgcctcgatctttgcttgttttttccgattgataagagcaagtggtttttcaagcagatctgtcaggatggcaaagacgagaatttctaatagaattttgaccagatacttgggactcaagataaagctcattgcttctctctttccaatcacatccatagctgtcacaagcacagcaaagaatagacctgatcctaggcgactcaaccagctatctttttctaacatatctcgaacatcaatccctgaactgatccttctcacaaaggcataggctcccatggcaatcagaaggaacatctcagggagataagcgactaggtctaagtccaggatactggatttcacaaaggcggatagggcaataaagcaggtcatgccaaggacaagttctcctgcgatttttccatcaagtagcatggtccgttcatcttttacaattggttctttcttttgtttcatattcttcctctttctattattaaaactgttactcccagaacagttgatccagcgtcttatccaaggtcttacagatagcaaggcagagactgagggttgggttatatttccctgcctcaatcaggccgatggtctggcgtgtcaccccgatggcatctgcaagatccccctgggtcatatcatgctcgacccgggccatttttaatttgagatttttcgccacatgattttcctttcttgtttttatagctttattatacactatattttctattttgcaatatatatcttgcattttgtaaaaaatatttttgataaaacaaaaaagaggctgggacaaaagtcctagcctctcaattatttttggattgtcgagcaagacgcagtggttgagtgggctctactacgctgatttcatcagcttttacagccctactcaactgtgcggaggtgggacgacgaaatcgaattctaacgaattaccgatttctgtcccactctcttatcttctgtacatttaatctttggtcaaacttccatcttttgtttgagtccgtgcataagcgatcaagagaagagaacctgcaacagccactgttaatgcattaaaagaacccgcaacaacaccttgtaggaagactttattggcactttccttgtagatcaagacatctccaaccggagcaatcaagccccagatcacaaggttggatacgatttgaacgatgttaaagacaattaattctttctttgtcacttcccctttgaattcaccgatttgtttgcggaagaaaccaacaaaaagtccaaacaaaccacttgaaatgatccaagtccaccaaagaccacctgacatagcatccttaatggcatgaccaatcaagccgattaagaaaccgacaatcggaccaaaaactacactaaagagagcttgaagggcatattgcaactgaatgctcgtattcggtgcaggtgcagggatttgcaacatagcaatcacgacaaagagggctgctccaaccccaatagctacaacatctttaattgaaaataatgatttctgtttcattctgatatctcctattaattttccatttttctaatctcgatatgccaagaagccccaactcctacattataggccttggcaaaggatccctggttgatggcaagaccaacacgataaagggaattgatataaaggattggctgtccaattcgcacatcggcgaaagacttaccgtaggttacttggttttggtaaaccagcatgtcattgttatagatggtcacttcaaaacgttccccaaattcaggtgccaaatgattgaactcttcccgagtaatggaagtccaaagagaaccaaagcgcacatctaaaatgtcaaccgcacctttaacaagattgtcctcaagaactgtctcaaccactgggatttccacaatatgttcgacactgagttctggtccgacgtcttcaaaactaatatggccactggccaacttagccccagtataggcgtagacatcacgcccatggaaggtataagaaaactctgtattagctcgacgattcttcacttctgaaatctcacggatagcaacaatccctacatgtttcttgataaaagagagagtgccattatccggagtgacaatgtattgatttttcgccgttttagctacgacactctttcgtttggaaccgacaccaggatcgaccaccgaaacaaaggtcgtcccttctggccagtaatctactgtctgaaagagacggtaactcccttcaaagatattgtagggggtaatatcatgagttaagtggtgaattttaagggttggcgattcttctaaagcaaccccaatcatagcggatactgctccatccaccaaaccaaagtctgactgaagaactagtaaattattgtgcatctttatctccttttttgtccaataatggaagaaggaagttcgatagtccccatcctaatccagcacccaatatgaccgtgaggacaaaccaagtgatggtcgctagatctggtgataccatcacccgattgacatagtctatcgatttaccacgatccagtaacgacatgcggtaactggctggatagaaccacatcataagaatgggccctgtcgtcgcaaaggcaaaaataacaaaagacaaggcatttcgtaaattcgagcgaaaacgaccacttgaggcgaccatctccgcaaaacttccagcgatcaaggctggaataaaggcccctgcaccatgacgcgaaaagaggaaaaaggatccgatcacgcagccaactataaagatagatccaactccttttattttttctagataatagcggtagatcgtcccgccaaacaaggctgaaaaggctggagcataaaacatatttccttgatgatcgaccagatttccaactaagacccccagtccaatcgcaagaaaatagaggaaaatgaaggctccaacttgttttatttgattcacatttattctattcattggatactgatcctaacggtggctaattttcttcgaaaggaagtccccgataaattggaccagaacgatcagaatcaggatcaataaggtcgccacaaagatgacatcattgttaaacatgtttttcccgtagttgatggccaaggttcctaatcctccagcaccaacggcacccgccatggcggtttctccgatcaaggaaatgatggtcactgttgttacacggatcaaatcaggaagcccttcacgaaggtagacaccaacaatatcccagaaggttgccccactggcttgtgctgcttcaatcacgcctccatccaattctgacaagactacttggacttggcgagcaaagaatggaaagacagccaaagacagcggaacaagagctgctgtaggaccgatggtatttttcaagagcaagtaggtcaagggattaataaaggccaacaagataatgaaaggaatggcgcggaacaaggaagtaatcttatccaaaatttggaaaacgattctattttcgatgacaccacctggacgggtcaagactaacaaaagccctgtcaccaagcctaaaaatccaccaataatgaaggaaataacggtcatgtaaagagtcaagtaaatagcagttccccatccatactggccagaccaccctaatttatagacatttggtaaatatgtttgaattaactggatcatacttttctcccatctttcacaatagtcacggaaactcctgcattttctaactcagctttggccgtttccagattttgattttcacctgataagatgaccaccaactctccaacaggcgtgttatcaaggatctcgatgttcccaaataaaatgttggcagatacttggtactgtttgtaaatatcattgatgatggctgtatctgtcacagaacctgcatacttaagatgcgccaaaatcgaatcatcaggcaagttcttcacaatcgcttgttgattgattttcaccatggcttcatcgatacctgttgcaactgtgataaagtcttgcgtcaaggcatttttcggattcgagaagatatctaaaacagacccttcttcaatcagttcgccattttgcatgacagctacccggttggcaatatctttgacaatttgcatctcatgggtgatcaagacaatggttaaaccaagttttttgttcaattcttgcaacaaagctagaatttgtttggtcgtctttggatccaaggctgaagttgactcatctgagatcaaaatttttggatcgttggcaagggcacgcgcaatcgctacccgctgcttttgtccaccagacaattgggctgggtaattttctgcacggtcagctagaccaaccaaatccaacaatttcgccactttctcattcttttgttctttgtttaatttagaatgtttaagagcaaaagccacattttctgcgacagtcatttgggccatcaagttgaagtgttggaaaatcatcccgatatcccgacgtttctcccgaagggcagccggttttagggtcacctgatcttgataaatcacatctccatcaacagtgatggttccggcactaggtacttgcaagagattgatcacccgaaccaaggtcgatttcccggctccagaataccctacaatcccatagatatcgccttcattaatatgaatggtcacatctttgacggcttggatctgacgtttcttttgctggaaggtcacatcaatgtggtccagctgaatcattgctttactcataacttgctattaactcctttatcaattcaatatgggtgtaataatcggcgattttcacattttcgtcgcccccatgatcacggctattggcattgccaattccaaaggctgccatcggcacctgcaaagcctcaaataccgtatgcatgggccctgtccccgctgttgttggaagaacagaaactccttctctatagaaatctttggccagccgaacgacatttaaaatcgatggggcactcatatcacttcggtaactcatttcaccgagagtatagatcaattcgacctgatcatagccatttttcttcaattgttgcttgatcttttctaagacatccttgggatccagtccaggaaccaagcgcacctccatcttggcacgcgcctctgccggaagaatcgttttaacaccttgtccttggtaaccagagccaaaaccttcaatattcagggctggttcaaaatagaaacggcgcaggaattcttttcggtcttccttcaaaattgggagggttaaaccataggtttccgctacatcttctggtcctttgttggcatattgctcgatcaaagctagctcgcgttcattgggttcttgaatctgatcataaatcccatccaccaagattcggccttctttgtcacgaagactggcgatggcatttaacaaataccaagaagcagagtctaccacaccgccatagctggaatgaatatccacttctgcactcttcaccaccatatcaaaggtgacgatccctttgctaccaccggaaatttccaactgaccctgattatttcgggtaccttgttcccagactaagaggtctgccccacgcaagtgtttcttgtgtttggccaagtatttatccaagtcagtcgatgcagactcctctgccccttcaatgataaaggtgatattgactggcaaatcgccactttcacgaatgtattttcgaagagctgtgagacgagccgtgatatgccccttatcatcatcaacccctcgaccgtacatggtcccataatgaaccgataaggtaaaagggtctcccgtccaaggttggtctccatcagctggtaccgtatcatagtggttataaaaaatgatggttttggcttcaggatttggcgagaaaaatttggcaatcacaaaaggtgctgtatagctatcatcaacttcgactttggctcctgcagctgtaaaaatttcccccaaatagttggctacttccttgagaccaacttgttgggcaaagatggattttcttgaaatcaaggttcgcaacacttcaaaataatgttgtgcgacctcatcattttcaaatttacggatttgttccgcttctgttgcaaaaggcatgcattcctcctaatacacgataagaggtagagaattgcttctccacctccttcatacacttgagatcaaatcttaaaagactggttggtccattccttctgaagattcttcgatcactttcttcacattgtctttgtgataggctttgatgatttctttgattgcttttgctttatcagatttttcccaatctttcttagcagcgatcacgttgtaccattgttttgagttgttgtctttcttttcaacatagatagcttttttgaaatcaacgcctgcttcacgaacgaaggtattgttgatgactgcagcatctactgatggaagagcagatggtgtttgtgaagcatccaattcagagatcttcaaatcttttggattttctttgatgtttgacacgtttgccaattgaccatctttggtatccaatttaatcaaaccagctgattgcaagacatacaaggcacggctttcatttgttgggtcatttggtacagcgattgttccacctttaggaatttctttaattgaagtgtatttgtttttaccgttttctgtaccagagtaaagacggattggagcgatgtaggtatctgctactgcaacaagggccttgtcatttttagagttccagttatcaaggaagttgtagtgttggaaagcattgatatccacgctaccatcttttacagccacgtttggttgtgagtagtctgtaaattgagtgaattccaatttgattcctgttttagcgtcatccaagttcttttgaacttgatcccaacgagctttttcagtgtcactcaaagtcataacacccacttttacagttgtttcaccatctttgctagatgattttgaagaaccacatgctgcaagagcaaatgttgcaatagctgcaagagctgttaaaccaagaatttttttcaatttcattttgaagtctcctttaattatatattattctttaatatcttttgcttctggtagataaactccaccaaagtattttttagacagtttttcaagggttccattgtcatagagttccttgatacgtttgttgacaaatttttgaaggtctttatcttcttttgcaataattggatacacataaggctgttggtcgcttggaagctcgataaccttcaagttgtcatagccttgatcacgaatgatggtatctactgagatccgttcgaagatcttgtaatctgtacgaccatccgctagattagccatgatggtttgaatggttccatctgtgtattgcaagtcagttggattatctgaatgttttttattgaaatcttctaattgtttagcagtagatgttccttgaacaacttctgttttcttgccaccaatgtcatccaaagatttaatagaagaatcttttggtacgaccaatactaatggattgcgagcatatggatttggatagagatatttttcttcccgctcttttgagtagctaatgttgttggcaccgatttggaaacggtcactatctaagccagcaaagactgaagaccactctgttttgttaaagtttacttcatatttgtctgaacctttgaagatttcacgcaaaacttcgatttcataaccggttagcttgccgtctttttcttcgtaagagaatggtttggttgttccaacagtcccaacttcaatggttttcttaccactggctgatttaccagatgaacatgctactaaagcactggttgcaaggactgcaactaatcctaaagcagaatacttaatcactttttttagattcataggatctccttattcgtttcaggcacataaaacgccattttaaaagtattttttaattttatcaaaaaagcatttacttgcccaatatatattttttatggaggtgatagtttttctttatcacacgtctttggccttaaaataccgcaataaagcttgcgcattttcaacataatagggaaccgacacctcaaaggctgcatcatcgatggtcatgtgatcatgatgaagatctggcgcatccggttctccgtttgaaccgataaaggcaaagactccaggaattcgctcttggtaaaaggcaaagtcttctccagctgtagaaggattcgctggaatcacttcagccaagtcttgtgaagcttcccaaaccactttcgtcaattcctcatcattaaaggtaactggcggggtcacaccccattcaaaagctacatctacttccagactttctgcaatgtgtcgaatgatggaaataaaatgtgctttcaagtctctttgcacactaggattaaaggagcgaatggtcccttcaaaatagcctgattttgggagcacattccaagttgagcccacatccaggtgcgtaatggacaaaacagctgtttcaaagggagaaacggtccgtgaaattaataattgtaagttctgaaccatagtagtgacggccgttacagtgtcaactcccaagtctggtcttgcggcatggctactaacacctgtcacggtaaccttgaatttctcaacccctgccatcatagctccagcattcaaagcaagttgccctgcttttagctggggaatattgtgaaaaccaataattccttgaacatcctccaacagtcctgttgccaaaacatcagaagcaccttctgagatttcttctgctggctgaaagatcaagcgtacggttccttcaagctggtcttctttttccttgagaagggctgctgctcccagaagactggtttgatgaaaatcatggccacatgcatgcatgacgcctggattctgactttggtagggcagattcgtttgttccaaaattggaagggcatcgatatctgctcgaagtgccaccaccggttggccggagccaatttctgcaatcagaccagtttttaatccactctctaaaatacgaatccccaactcttctaaacgctcttttagaaaggcggttgtctggtattcttgaccagacaattctgggtgttggtggatatagtggcgaatctctgctaactcttcataagaaaaagacacaagccttcatctcctttcaaacttaaaattattttatcactaataggtgtttccgtctaatttctgtttcttgggttttgatatagttttaaactatagataaaaacactcctagatacatgtcctaggagtgccaaattcagcattaagaaagatttccctcgaatttttccataaagctatcactattataggctttttctacttcccatttgccatctttcttaacaaaggtcaactggtagtcgtaccgatccggcgtcgtcaagggacgatctgcaagagaagccatcatttcctctctataggctttgttttgagcctgatttgcctcgatgatacctggatagtcttttcgatgttcttgatagaagttctgcatgtggtttaagatcgtcttttccatgctgaccgtctcaggattcaggctaataaccaccttgtccgggagatattgtttaaccttataggttaatttcgcacgcttagcattttctttttcgtaagcatcgataaactggttcacttcttcttcagagaattggtaatcatgtagtttacgagtaaagtcagcggcaaatttcgcatggaaatcactggcttcctttttcaaatcagttcccaaaacaaaagcgtcatcctttttgacctttcgttggccactgaagtaaacttgattgatgtattcatctgctagaatagtggaagcttccaccttatcctcatactgagaagaatccaccgcaaattttagaggtttggattttttatcagagctataagtttttcgttcatactgcacttcgtattttttgcctttttcgactgggaaaacgatatagccggttaattttttatccttagccaactgatcactcttgagcaattggaaggcttccgtttggtcataaattcctgactgcaatttgaccttgttattatccgcatcgtaaatagtgatatctgaatctgacacgttgatagattctttggcaacattcttaaattccaattgaagggctaaataggttccgtcttctgagtcattgaggacaggtgatttgatgtattgccctccttttaaactcacctcgacttgaccgtcagatgcagagcttttcgctgctttttcagtctttgcttgctgcgaatttgtcttttgagcagtagttccacaagctactagactcaaggtcgccacagcaaataaggtccatttaaaaatctttttcattctcatctccttaaaaaagttttgttctattttaacatctttttctatctatgtatacgctatatagtgatatctacctccacaaggaaccctgatcagaaaaaggctgagtcttccgtctcaaccttctgatttctatggtaaggatcctttttggccttctttacaagattcctttttctttttgaatcaagagatccttgagggaaatcaagagaacagctagaagaatcatggccattccaattacatcaaccataaaaaaatgctccttcataatgacaaaggcaaagaaaactgccgaaataggctcaaaggaagccagcaaacttcctttaacggctccgaccaaagaagtgcctttcaaaaaagctgtataggcaaaaatcgtcccaatcaccaccaagccaaaaagggccatccaggtatcgagtctgtagtttccagaagaagagagaagaccactaaaagggagcattaggattcctggaatagtcatcccaactccaatcaccagcatgcttccccatttttgaattaagttcagaggtagaatgatgtaaagggcataggcaaatgctgacaccactccccaagccaaacctttgggattgatggccaattgattgagttgaccatgggttgctattaagaatgtgccaccaatcgctagaagcatcgaaaacacttctgctagtgtaggggccaccttatccatgatacaggtataggctaaaattcccactggacagagatactgtaacaccgtagcagtcccagcattggtttcagcaatcgcctctaaataggtcaactgagtcaataacaatcctaaaaaggcaaaaataagaaggggaaggtaggaagatttatctttggcaaaggccaaaaacttctccttatctgcaacgtaggaaagaagaataaggacaattccagaaaaaagcaaacggagatttgttaactcaatagccgaaaatccatgaaccattaaatattgcccgctaactccggatagtccccaagcgatcccggcgatcaaggtcatgagtgttcctttcatcgtctttgacatagtcccctcctaaatctgttccttacttttattgtatcataaaaggccgaaacgaaacgtttcagcctcatatatttcatataaatttattcgcttattcaggttgaaccaaaatcttgatttgagatttatcttgtgttaattcaataaatccttcttcaacgatattttccaatttaattttcttggtaaccaatttttcagcagagaagtagccttgttccatcaattccaatactttagggaaaatatgacggtaggcaataattcctttgagagatttttcttggatagcgaattcatttggattgatgctagcttcacgttcccagatagatacgaccatacattccccagctttatgaacagctgcaagggcttgacctaaaacaactggaactccagtcacttcataagaaacatctgctccaccacctgtcaagcgatggatggcttcgacgattgtttctccttcttctgggcgaacaacgattgctcccaattcttccgctttcgcttggcgttcaggagataattcaaccgcatagatttttgatgctcctgctgcacgaagggcttcaacaatcaaaagaccgattggacccaagccaaagataacggctgtatccccagttttcaatgcagattgacgaacggcataaacagccacagctgcaggttctgtaagcgcagcttgttcatagctcaagccatctggaatcacatggacaatgtcaccgtcaaggacacaatatttggcaaaaccaccatctgcagcaaggccgacaaagttcaagtttggatcaaggttatagtcaccgattaggttatgttttgccaaaattggttcaatcgtcacgcgatccccaactttgacacgagtcacatcacttccgacttctacaatttcaccagagaattcatgtcccaaagtaaccggtgctttttgaccagaatacacatgttcttcagttgggatgaagatcggtccatccaaatattcatgcaagtccgtcccacagatccctgtgaacttaactgccacttttacttgatgtggttgtacttcaggtacttccacttcttcgatacgaacgtcttttgctgcatgccagcgagctgctttcatagtagccataggataatctcctttatatttccatgatttgcattttccttttcaggaaactcaacaaatccattgtaagccttttcacaaactttgtcaagaaaaaactgaagatgaaaaaagagccgcccttcgcctgctccttcttacctcttcttgattcgtgaattctctattctccagcccacaatccaaccaaggacaaggagataattttcaagcgcaccaatcccattgaccggcagatgatagtgaaaataactgaaaagatgattggtcccaattccaaacccaccaatgatcaaggccactagtaccgtccgaagataaaaccaatcgtatttgagattgacggcaatcaagatcacaaggactgccatattccaaatcccaatctcccgttgccaaccgacagaaataccatatcccgaatgacttcccatataggatggaaagaatagttggaagataatcgctccagacatagcgataatgactaggataaataaaactcttaaaaatttgttcatgtgactcctcctaatgctagttgatatgtaatggtctttcctattctaacacaattttatggatagtaaaaaccaacctctcggctggttctttttctatcaatcttctttcaacttcgccaattcttgggcaagtaacttgagggctacttgtgggttggcttggcctttggttgctttcataagaaagcctgtgaaggccttgtccgcattccgtttccctgacttgaagtcggctacggctgcttcattgtctgcaaagacttggtggatgattggaatcaagacttctggatctgaaatctgtaccaatccagctttttcgacgtattcacgcgcaccgccaccgtttttcgccaagtgaacgaagactttcttggcaatcttagatgagatggtgccatcttcaatgatggcaatcatttcgaccaagttttctggtgtcaattggatttcttccagcgttttaccttctgcgttcaagaattgagccacttcaccttggagccagttagacacttgcttggcatctccaccaagggctacggctgcttcaaagaagtcagaagtgactttcgtcgctgtcaattggttggcatcatagtcagacaagccaagctctgccacatagcgagcacggcggtcttttggaaactctggcaactccatgcgcatttcctcaatccactcatctgagatttcaaacaatggaaggtctggttctgggaagtaacggtaatccgctgccccttctttgacacgcataagaatcgtgctcttgttggcctcatcataacggcgtgtttcttgacgaatgacaccacctgaacgcaaaatttttgcttgacgctccacttcgtattcaagtcctttacgcacgtttgagaaagagttcaagttcttcaactccgtcttggtaccaaattcctcttgaccgtatgggcgaagagaaatgttggcatcgacccgcatcgatccttcttccatcttgacgtcagaaatacctgtgtattggatgacttctttcaaagctgtcaaataggcgtaggcttcttccggagaacgcatatctgcttcagatacgatctcaatcaatggaactccttgacggttgaggtctacataagagaagccatctgttccgtgggtgttcttaccagcatcttcttccaagtgggcccgttcaatcccgattttcttggttgagccgtcttccaattgcacttcaatccaaccgttgtatccgattggctcatcaaattgcgaaatttggtaagcttttggattatcagggtagaaatagttcttacggtcaaagtgcatgtgctggtggatatccatattcagggccaaagcagccttgatcccagcgtccacaacacccttgttcaagacaggaagcacccctgggaaagaccagtcgatcacattggtattggcattttgctcgttcccaaagtgagcagaggttggtgagaaaatttttgagtttgtattcaattcaacgtggacttcaagtccgatgactgtttcaaagttcattaattgtcacctccgaaaataaggggttgttgcttgtggtaatccgtcgttgcttcaaaggccgctgcagcttggtagatggtctcttccgaatacttcggaccaatcaactgcaaaccaactggaagtccttgcgcaaaacctgcaggaatcgaaattcctggaagacctgctaagttgactggaatggtcaacaagtccgccaagtacatggcaaccggatcatggttgagcgaatccaaatcaaaggccacgcttggagctgttggaccaaggatgaggtcgtaatccgcaaagactttttcaaaatcttggataatgagggtacggacttgtccggctttcttgtagtaagcatcgtagtaaccagatgacaaactgaaggttcccagcatgatccgacgtttgacttcatcaccaaagccttggctacgagtgttcacgtagatgtcatccaagttcttagcatcttccgcacggaaaccataacgaatcccgtcaaaacgttgcaagtttgaagatgcttctgaagaagcgatgatgtagtagacagcaaccccatatttagaatgaggcagactgacttcttcgacagttgctcccaatttttcaaagtgcttagctgcattaagaatcgtttctttgacttctgggtcaattccttccccaaggtattctttcggaagggcaatcttcatccctttgatgtcttgaccaatcttagaagtaaagtctgctacacgaacaggtgcagaagtcgaatccttgtcatctgcactggcaatcacattaagcaattgcgcattttccttaacggttggagcaaacggtccaatttggtcgagtgagctaccaaaggcaatgagaccgaaacgagaaactgttccataggttggcttgaggccaacaatcccattgaaggcagcaggctggcgaatagaaccacctgtatctgaaccaagagacaaacggacttgtcctgaagcgacagaagctgccgaaccacttgaagatccaccaggcaccttgctatggtcccaagcattcttggttggcccatagtaagaagtctcaccagacccacccatggcaaattcatccatgttggtttttccgacaacaatcatacctttagctttggcgttagcaactgctgtcgcatcaaagataggctcatagttatagagcatttttgatgccgcagtggtcaagataccgtcagtagagatgttatctttcactgccaatggaatccctgatagaagattatctgcattgattcctttttcgtcaatagccttagcttgggaaagcgctgcttcttcagccaccgtcacaaaggcattgaccgcttcttcacgcgccttgatgtcgtcaagtgtcgcttgggtcaattcggttgctgaaatttccttagagacaaggaggtcgtgcaactcttcaatggttttatggttgaatgacattaggcatctcctccatcttctaggatagctggcaccttgatgtagtaattgtctttttcaggtacatttttaaacaaacggtcgcggtcagtgcctttttcagcgacatccggacgcaatacggtcttacgatccgccatggttgttgttggggccacatcggttgtgtccacttcttccaacaattccaccatgtcgacaatcttagacaaggttgtcgcaaactcagctgtctcttctggagagaatttcaattttgaaagattggcaacgtgggttacctcttcttgcgttattttcatcttgcttcctttcgtgaaatgatgatttttcaataccctctattttaccataatttagcccaatttgcttgccttagaaaaaatctgtaggacttttttgtcgctacagattcttcattttatatttcttttccgccgaattgccccatctccattagagtctctttccagacttcctggaccttagaagcgaggtaagaagaggccaactcataagaagcctgatggaatggagcgaggtcgctttcaaagagctggaccagcttgtctgccaactctttcaccaactcttcttctggcactgtctcgctataaggtaccaaaaagccattttcaccctcttttataaaagttggattaccataacgggcatcaaagccgagcaaggctaaccctgctccagccgcctccatcaaggtcaatccaaaggtctcccactgagaagtggtgaggtaggcttggtagcaaggatagatctgctgaagatccgcatgaccgcgtaggtgaatataatcttgtgctgcaagctcctgaatcaggtggcgcaagttgtccgcttctccacccttcccataaatatcaaactgaagggctgggagtttttcatgagcttgggccactactcgaatagccaaatcgatgcgttttcttggatccaaacgggaagctgtgagcacactaaagggaggtcgatctccttgtgattctgtcaattcttctagatgcccaaccggaatgctatagattggaattccttggcatccttgtttagcaagtgtctgctccaagacttctttttgaagatccgttgccgtgatgaaataatcgaagcgtttagcatacttgaacacataataatattcataattgagatggccattttcaaattcatgctccgaatgaaacaccatggcgagctttgaagaagcaggtttctccaacaaagggcgagcaaaatccatgcgcgaagcccggtcaagcagaatcagatcttcttcttttagcgacagctgcgacaaaaaacgtctcatcacttctgtatggttggtcaaaatctcagaccccagtttatagagccagcttccacctaacctcgattcttcaaaagcgatagtcccatcttgatggtgatagatccgtctgacaacactaccatactgaaaatactctgtgacaagtttacaagctccataatactctcgcttgatcctatttccagccaaaagatagtctacatagcggacacagtttggatgatagggatccaaatgaaagctcaaggcgtttccatccgcaaattggtagcgaatgactctttccgttttttcaacaacatccagacgagtcagttgaaactccatttgcaaggcccctaccgacttttgagggaccgtagtctgttgatccgtaaaagttaaatgggcaaaaagcagttcctcatcccggtgccccaatgagaggtaataggccaatttttctggagtgggccaagtggtaaagacaaacttcgctgccactcctagtctccggagcatctttgcccgagaggcttgtgcaacatcaaccccattaggttcgaatcccactaatagattaaaggtataaatggtcatgcggttcctccctctaatcgcttaaacagctcttccaaagcttctttttcaggcaatttcaagattcgtgcctgctctcttaccaattctttgtgggtctctggatgctggagcaaggtatctagttgctgtttcatttcttcgactgtatctgtgattgtgctcaagtttttataggcttcctgatgaaccgtgctcttcaaaccaaataagacttgcccattttcaagagcatgaagactactactccacacttcttctccctggttgcaatccagataaatagagcagctggataacaagtcctcatatttgtccagcgaaatccctggatagaggcgcacattggagcgagtcgctaagtctgttaatttcggccccatagccgtcaaagcagcaatgtgaaaggtcacttgtgggaattgatggaccaggctagataagccttcgacctcttgagaagccgtcatgaccagggcttctggttgaaaactatcctgctccacgtctactagccccgacagagccgtgattccgtcttttttctcactcaaaaggccatcttctaccaacaaaatctggccaacctgctctttgatctcatctagagcatgagcttcacgagcacagtaggctagtcgctcctttggtatctctttcacaacatctaacaatgttttatccatcaaaaggatggcttcatcttccggcaagacttgtttcagaacagctctttgtagctcttccttactggcatacaggcgatcccgtcccttaggagtttgatgcaaaaagatcccttgcgaaatataatgaagcaggacttcttcttgctgacggttcaaataaatgtctaaataaggttgaccagcatcagtaaggagactttgcttgcttctccagccatagcggttgtaaacatcaatggatacgatctcttctccccgaccaaaccactccactctttcaaccgttcgtgacaagatatcctctcgcaaaaccacattggcacgacgctcctctccatcaaaaagataggttgtgatcccaagcgtccaacattcccataattctgtaacctctaaatcattgaaaaataaagggttcccaacttttgatgccgggtctttttgggtaaaaaaggtcgccagactctctgtctgttcagctacatctgtttccagattggtcacaaacacacggtagggctggccaagtttgtccaacaattttcgcaaacgatccagctctctggtctgctctgatgcaataatgaacatgctgatcctttctcatcaataagttcttagtccatggtttcaacgaaactgaggttgatcaccacgcgctcataggtttctgactcttgtaagccagcttcttctagtttttcaagagcccgtttcaaccgcgttttatagatatagcggtgccaggtcagatcatagcccaacatcccaagaagagccaatttttcttgcttggcttccatctcatccaatacccgcttttctgtccaaacctgggacagagtatctgaacgacccacgcgataccaataaatacatttctccgtatgaaccacccgattggcttttaagaagagcttgtacatgagaaagttatcttcaacattttttccgaccagaaaacgaagcccttcaaataggttacgcttatagagcttcatcatagcacaggcccaggccatatctctggtctcctgaatggcatcgtggtccataattgctcgcccctcataaagggtctctgaataatcagcatccgttaccttgatcaagtatttgctactactgtcatcatagaggttatagttggctactgagacatccgcatcatacttcttcagttggcgatagagcacttctacatagtcctccgtcacccagtcatctggatcaataaaggtgatgtaatcaccagtcgctaactcaatccctgtatttcgagcaacagataagcccccattttcttggcggacgtagcggatgcgcgcatccttcctaaaaaattctttacagatctcttctgactgatctggcgaaccatcattgaccaatatgatctctaaattcgggtaagtctgatggataaccgtttccaaacattgcctcaaataagcttctacattatagatgggaatgataatactgactacttcatttgcttccatacttcttctcatttctctttaaataagcgcgaatcgctgtcaccatatcctgcacctggtcatccctaaacacctgattctcaccattctccacatgattggttccttcaaaagagaaaatcggcaagcccaattgatggatcgtttgcgtcatctgatccacctcatcataaggattgatatccaggtaaaaatccaatttctctaagacctttcgactggtcaaaggatcaaaagagggataaagaaagaggttggggtagcgttccaattgcaccaagttaaaaccaaaatggctatgggcaaggacatgaatcgctacgtctggcaactcttttaacaaggtctccaactcgtggatatctgctgtatgggtataaatagccgcatgataaggaaaatctcccactagatcttgataggtttgcttcaaaatcggttttcgaagcaaaatttcctcccaagagagggcataataaaaccaccataattcacgaaaacgattgaagcgtttggaggtccatggtttattatgagaggtatagtgaacgactgctgggatcccttggaaggcatcataccagtccaaatcaccatagagatattgatccttatcagaccctacttgtagattataggtccaaggtaatggataccaagcatctttgaaatacagattcaaaattccttgatctccgtaaacatgctgatggtgctcgccagtgaggtcaaaaagagcctctgtcacttggtgctcttgccaccaagccttatcaatcaccaaaagtccagcattaaaaccatctgtagtcgtcggcttatctaccactgcacccagtccataaccttttagatcgacctcaaataaaggcgataaatcctgtgtaaagatcatatcacaatccagatagaggattcgctcttcttccaccatctctggaatagcgtaacggaaataggttgcatagtgaatatggtcactcggaagcgaaaaggactggaattgctcgggagacatccgacaattgatcacttctgaatccaacttgcgcaagcgctgattcatgatagtaaaccactcagttggtagatcttcatttaaaacataaattttcaactggtcctgatgggcacacagtgacttcatagcggtttccaacttttccatataagacagattggctgaaaacacgacagcttttttactcataacttccccttttttctttcattagaataccattttcaagagaggaaaacaatttctaagcccaaaaaagaggcctagacaagtgtctatgacctcttttacatcggtttcttattttgggtctaattcagctagtgtatcgtctaccaaacttgcccctaagacatgcttgaagtgattcaaagcaaactggtgattttcaggagtgagcgatgccactgcaggttccacaacttcgatctgataacccagattgtaggcatcaaccgctgtatgaaggacacagatatcggtcaagacacccgtcaaaataacagtatccacatgacgttcccgaaggcggatatctagatccgtccctgaaaaagcagaataatgacgcttgtccatccaaaagacacgtgaatccgctttatgttctcgataaaaatctgctaaagggccgtacaaatcgcgtccactagtcccaatgatattatggggtgggaagagcttgctttcaggatgaaaaggatcgtctacatcatgcgcatcaatggcaaaaaagacataggctccttgatcaaaggccaattgggtcacctgagcaatgctctcagaaatggcttgtgcaggagcacctgccgtaagcttaccatcatccgccacaaaatcgacagtatagtcaattgaaatcaaagctttggtcattagtaatctcttttcttaatttcttcaaaaatatctggtatcaacactttaagataagttcccttcattccaagagaacggctttcaataatgccggccgactccaatttccgaagtgcattgacaatcacagagcgagtgatgccaatccgatccgcgatgatagaagcagtcaactgcccctcatttcctttcaattcactaagaatggcagaaacagcccgcaattcagagtaagacaaggtattgacagccatattcaccgctgtgcggcgacgaatatttttttcgtcttcttcgcgttggaaattcaacatttgaatccccaccacggtactcgcaatctcaaccaagatcaaatcatcatccgcaaactgtttatcattgcgccaaatgatcaaggaacccaatcgaatcccagaaacatgaataggcgcaatggtcgtcaagccatcaggaaattcagacttggtttcgaccggaaagatactcaaatcatggtccacatctaaattagcttctgtatcgtagaccaaactagctgccttggcataatcttctggtaattttttattttgaaagaaagcttctacccggtcattgttggtcttgtaacgcatgaaataaccaagaagggttcccttgctattaatgatacaggcattacagtggataatatccgctaattgttgggcaatatcattgtaaggcatctcgaactgcaactgttcatcagtccgtttcaagatggatgtaattttacgtgtcttttctaataagtttgccataataaacctcgcatatagtcagctcaagtatatcatataagtgtgggaatttcaatcaaattatctgaaaattatttattttttctacaattatgcgcaattcagaaaaatgacgatgagataacatggattttatagaatgaaacaaaaaaagagagtgggacagaaatcggtaattcgttagaattcgatttcgtcgtcccacctccgcacagttgagtagggctataaaagctgatgaaatcagcgtagtagagtccactcaaccactgcgtcttgctcgacaatccaaagacaattgagaggctaggacttttgtcccagcctcctttaactaattaacgtttgtattgcttcaagaaacgagtcattttttcttgaatttgagctaactcatcgacacgtggaaggtaaacgatccggaagtgatctggatctttccagttaaagccgcggccatgaaccaagagaattttttcttgcttcaagaactctaaaacaaattgctcgtcatcatccacgcggtacatgtcccgatcaatcttagggaagatatagagaccagcctttggcttaacagctgagaggcctggaatatcattgatggctttgtagataaagttgcgttgttcgtagattcgaccacctggaagcaagagttcatccacggattggtaccctccaagagaggtttgtacaacttgttgagccaagacatttgaacaaagacgcatattggacaacatgttcaaaccttcgatatagcccttcacatggtgcttgggtccggatagaaccatccaaccaacacggaaaccggcaatccggtgagattttgacaagccattcatactcacacagaagagatcaggcgctaaacttgcgatagccgtgtgtttttcaccatccatgaccaagcgatcgtaaatttcatccgcaaagatgatcaagttattttgacgagcgatctctacaatctcaagcaggatctcatctggatagagggcacctgttgggttattcgggttgatgacaacgatagccttagtgtttgaggtgattttcgacttgatatcttcaatatctggataccagtttgcttcttcatcacaaagatagtgaaccgcattcccaccagctaggctgacggctgctgtccaaagaggatagtccggcatgggaaccaagacctcatccccgttgtcgagcagtccttgcatggacatgacgatcagctcactcactccatttccaaggtaaatatcatcaatatccacatttggaatttttttcaactgacagtactgcatgatggccttgcgggctgaaaaaatcccttttgaatctgaataaccttcactatcacgcgcattcatgatcaaatcatggatgacttcatctggagctgtaaagccaaattcagcaggattccccgtattcaaacgtagaattttttctccatttgctcgcatgcgcatggcttcttccaagactggaccacgaatatcgtaagcgacatgttcgagtttgcttgatttattatattccttcatattctgcctcgattcacgaaattatctctattataccactagttcaaatagagtacaaaccgaggactttaaaaattctgcaaaaatatagcagaaaagcgagactttacctttacattctagctcaaaagagataaaatataagtgtataaagaataggattcccttctattctatccatgttttcaagctataaggaggtaggattatgtctcaaaaatacgaaaacattatggtcgctgtcgacggttctcatgaagcagaattagcctttgaaaaaggggttaacgtttctcttcgcaacggctctaaattgactattgcccacgtcatcgatacccgtgcccttcaaagcgtctcaacttttgatgctgaggtctatgaagaattgcaagacgaagccaatgaattgctcaagggctacaaggaacgtgctgaaaaagtcggggttcaaaatgttgcgactgttgtagaaatgggaaatccaaaggtcctcttagctaatgatatcccaagtaaagaaggggttgacctcattatggtcggggctaccggacttaatgccttcgaacggttaatggtcggatcctcctcagaatatatccttcgccacgccaaagtagacttactagtggtacgtgataaggataaaaccatgtaagaaagaaaaagtttggaacaaaggttccaaacttttttagttgtctttttttgcttctttttgttttgcatgtttttcgtaggccttgagctggcgatcgagttcttttttgatggctggttctggggcgtatttttcttcccaatcatctggcttcagaattttgtgagttactggatcaaagtgcgcctttccatctgggaaaatcttgcccatattggcccggtgaacaatctcgaagatctcttcaggatcgacccccattagtacaaagctaccataagtcagatagagggtatcaattaaggcatcaacctgccctaccatggagatctcagctgtatgcttactccgaaccttatctgcagccttatccaaggcttcgtgaagagctgctaccgagcggtcaaattcttcctcacttgtgctagctgctcggacaaattctaccaactcctcttgcttgaacatggttcgataaagggcatcttgaggctgccaaacaactggtttctcctgggtttccccatccatcacaccatggaaggttttgaccttattgaagtgatcatccttagaaagaaagagttctttctctgagagaataccaaagtgttgcagggccttttgaatgccatccttgccattactggtcgtggtatgcttggcaatcgctttgacgctggtcgtcccatttcccatcgcaatagacaagccaacacctgacagcatctctaagtcattatcagaatctccaaaagccatcacctcatcaatgtcaaagccaaattcctgaccaacgatgcggatcccttctagtttggaaatgcctgagttgaggacgtctgctgcaaaaggactagaccgtgtgaatttcagatccggaaactctttttctatttttgcagtctcttctgggctcgataagatcaacacttgataaattggttcttgtgctagtgcatagagggtgtcctgatcttgtgggacgaccttgctgaccactttgttaaatcctcgactgactgtacgggccattttgcggggcacaaagcgactggaccaagttgaaataggactcatcccaaaactcatgatccgagaaccaaataccccatccttggtaccaagagcgatctccttacggtgttctcgagcatagtcaatcagctggtgcaggctctttttgtcgatcgggctggtaaacagcacgcggtccttggtcaaaatatactgaccattataggtcactgcaaaatcaaaaccatagcgttccataaacggtttgacaaaggccggtcctcgccctgtcgcaaggccaacatagatcccttcttcctttaaagactgaatggctttttctgttgatttgaggaccgctcgactatcattcaccaaggttccatcgatatcaaaaaagactgcttttatttccatgtctactgtttctttctttttatgataaaataaattatatcacatattccaaggagcttcacatgtttaagaaaattttagcactacataccggagggaccatttcgatggcggcagatgactctggggcagtgattaccaatgaagtcaatcccatgacccaagttacttcaccaattgaagggattgcagtcacctcagaggacttcttcaaccttcccagccctcaaatgactcctcgtcacatgttagccctgtatcaaaaaatcaaagaggaagctcacaactatgatggcatcgttattacccacgggacagatacgctggaagaaacggcttattttttggataccatggagttaccagagatcggtgtggtcattacaggagctatgcgaagctccaacgagctaggaagcgatggcgtctataattttctgacagcccttcgagtggcgtccgatccaaaagcacgcgataaaggcgtcttagtcgtcatgaacgatgaaattcatgcggctaagtacgtcaccaaaacccacaccaccaatgtcagcaccttccagacaccaacccacggcccactaggtttggtcatgaaaaaggaaatcctcttctttaaaactgctgagccaagggtgcgctttgatctcgataccatcgatggttttgttccgatcattgctacctatgcagggatgaaaaccgatctgctggacatgctggatctttcaaagctcgatggcctcattatcgaagcctttggagcaggaaacatccctaaagaaacggcacataaactccaagaattcatggatgcaggccttccaatcgctttagtatcccgttgctttaacggaatcgctgaacccgtctacgcatatgaaggaggaggcgtccaactccatcaaacaggtgtctttttcatcaaagaattaaatgcccccaaagcgcgcatcaaactcctcatcgccctcaatgccggcctaaaagaacaagaactcaaagactatatcgaagggtagtataagatacaaagggcgtaaaatcccatcttaaaagtgagtagagtggaaacaacacatttccactctactcactttttatgatctaatctaaatgttcttgcttctccagataaagagagagcaaatgccagtctgggtgttctcgccaacctggagtggctacgatctggctagcaactttccttgcttcttcaagaatgggataatcttcaactaggtctgctacttgaaactctggaattcctgattgacgggttccaaaaatttcacctgaaccccgcattttcaaatcttcctctgccagcacaaacccattggtcgtctctgtcatgattttcatgcgctgtttgccactatctgttttaggattggccactagaatagcataggattgcttatttccccgaccaacccggcctcgaagctggtgcagttggctaaggccaaaccgatctgcatccataatgaccataacggttgcattgggcacattgactcctacttcaatgacggtcgtggatactagaacatccacttggtgctctttaaaggcctgcataatggtctctttttcttcacttttcatcttcccgtgaagaagagaaacgcgtgcccgctgaccaaagaaggcttctaactcctcctggagggcaagggcatttttcaaatctagcgcctctgactcctcaatcaagggagagataaagtaggcttgagaaccttttgcgagctcttttaccaaccagtcgaggaccacttctaactgctcatgcttgacccagcgcgtcatgatttccttgcgtcccgcaggcatctggtcaatgatggacacatccatatctccaaaagccgtgatggccaaggtccggggaataggggtagccgtcatcatcaggacgtctggattttgtcccttttctcgaagaatacggcgctgggaaaccccaaaacggtgctgctcatcaataatgactaaacctagatcttgatagtgaactccctcttgaatcaaggcatgtgtccctacaatcagttgagtttttcctgatgcgatctcctctaagacttctcgtttctcagctgcctttaatcctcccgttagaagagcaattggcaagtccggaaaaagattttgcaagctttccttgtgctgctctgccaaaatctccgtcggaaccatcaaggcagcttgcttcccagcgcttaaagctgcatacatggcaagaccggccacgactgtcttcccgcttcccacatccccttgaagcaagcggttcatatgataaggagaggccatatctgtcaagatttcatttaagctgttttcttgagcttgtgtcagctcaaaaggaagctgtttttttcgttctgctaatttttctggatcccaggctaaggaaattccttggctagcatcgtgattttcttcttttagcacttggagctgtagctggaaaaagaggagttcttcaaatttcacccggcgaagggcttgcttgtactctgccagatccttaggaaaatgcatagcctgcactgcttgagagcgtgacaagagttgataacgctcccgcaagacttggggcaaattctcttctaaaagctgatccaagccctgatcgaatgctattttgatcaattttatcaggctgttttgactgactccttgcgtcacccgatagactggctgcaaatcatcttccacctgagccaagagcttcattcctgtcaaactgccttttgccttgtcccatttcccaaaaatcgccacggtctgctgaacctcgattttgtctgctaaatagggttgattgaaaaaattaaccgcaatcacttggtctccttgtttgatggaaaagcgcaagcgatttcgtttgtaaccataatattggacattggctggagttgctaccaccccagatatgacggcttttcccccatcttctaactctaaaacattgcgcgttttgaagtcttcatagcgaaaggggaaatacaagagcagatcttctaaagtttcaatccctaattttttaaatttttccgccgattttggaccgacgccaggcagtacggataagggttggtgtaaattcattgttcctcctttcttttataaaaaagcaggtccttcagggaaaacccacctgcttttttattctttacctgcatagtcacgaggaatccgatcactcaagagacagactacttcataattaatggtaccacggtagtccgcaatctctgttgccgtaatttctttctcgccgtctcggccaattagggtaaccttggttcccagaggtaattcttctgggaggcgaaccgttacctggtccatcgaaacccggcctacaatagggcaaaactcacccttaattagcacatggaaattttgcatctctcggatccaaccatccgcatagccaatgggaatcgttccaatccattggacatcttccgtcgtataggttgctccgtagccaatatcttgaccggcttctaactgtttgacatgaactaactcacttactaaactcaaggctggcttgatttcataaggcaaggctagcaccgaaccacttggattcaagccatacatgacatctcccagacgaacagctgtgaaaatcgtatctgcatgccacaaagaggtggctgaattactcgcatgaacaatcggaggaagggtttcaagagcatccaatacttctttgaaaaaatgatattgcgcttgaaattttcgatcatctgcttcatctgctgtcgcaaaatgagtaaagattccctcaatttcagcatcagctgctaagaggaggcgttcagcctctttgatctcttctattcttcggaatccaatccgccccattcctgagtccaccttaatatggaccttcaatcctgataaatcttcttcttctccaagcaattgattcaaccaagcaagactagccaccgttaagcggatgtcctgctctttggccagactcactgtttcacttggcacaactcccaaaatcaaaatagggtgttgcaaaccttcttcacggatttcaagggcttcatccatattggatacacaaaagccatctacttgagctgctaattttttggtcactgcaacgaccccatgaccataggcattggccttgacgactgcatactttaaggtttgactcggaatatgctcactaacttgttgcacattaaaggcaatggcatctaaatcaattcttgcaacagttggtctatgtttacttgctttcattttcttcctccaaaatgacactggtcgagactaagtctcccttgtgactgatcgaaatccataccttaccagaaaaaggagacttggaaaaatagggtgctccgtgggcatcatttaaaatttctaactcttgaaaaccaactggtccaatccctgttcccatggcctttgaaaaggcttctttggctgaccatcggcccgtcaaatattccattttccgctttccagataattcctcaaagcgtgctcgctcagtctcggttaagactttttcagcaaatcgtgcattcttgtgataggctttttcaatcgcagcgatcgattcgatatcgatgccatgtcctttgatcatcttgttttatccttatttatcgtttcagtatcgtctaactgacaaaagagaaggggctaaagaatcactccttccgcccctgccttttacttattcatcgttgcaatttctttgaccaaggcctgtgttttttcccaacccaggcaagggtctgtgatggattgaccataaaccactggttcattttggcggccatcttctagataggattcaatcatgaaaccacgaactaaagttgccaaatccttgttccaagcacggttcatcatggtttctctcacgatacgtacttgctcttcgaattgtttgccagagttgtcatggttggtatccaacaggatgaagggatgttgcaagcccatttcgctatagcgttttgctgccactagcaaatcttcataatggtagtttggaatattcttaccacttgcatccaagcctccacgaaggatcgcatgagctaaaggatttcctgatgtttccactgcttgggcattgaacaaaaagttttggggatgttgggctgcataaatcgcattgaacatgactgaaagatttccagaggttggattcttcatgccggtcggagcagagatcccactagatacaaagcgatgctcctgatcttcaactgaacgcgctccaatggcatgataagaaatcaaatcctcaacatacggaagacttgctggataaagcaactcatccgcagttgtcaaaccagtttctgtaatcacacggtagtggagatgtcggactgctttcaaaccgtccacaaagcttggtgctgcatgtgtatctggttggtgcatcaagcctttatagccatccccattggtccgaggtttagccgtatagacccgcatcacaatgaaaatctgatctttgacttgctcttgcaagtctgccaaacgacgggcatagtccatcacagcttcttcattatcagaagagcaaggcccgatcacaagaaggatccgttggtcttctcctttgataatagcttccaattctcgatcacgcgcttctttgcgctccaaggctggaccttccaagcggtaaagcgaagcgatctcttgctcatcaatcttattgctcttcgtaatgaataccatacggcctccttatgctagctagacccatcctctttctatttcagaggagctcttaaaatttacgtccgtgacagtttttgaatttcttgcctgaaccacaagggcacaaatcgttgcgtttcacttgtgataagtcaatatctgctggaatatcttgttgttgcgctgcaatgttgcgagtcgcagttgttgaaatactgtgttccgtacgtggacgttcttgttcgtgaatttgggctttcatcatgagacgagtcacatcaaattcaatcgatccgatcatatcgttaaacatacggaaactttctgattggtattctaccactgggttattttgcgcatacccacggagtccaaccgcatttcgcaattgatccaaagcatcgatatggtccgtccacttgctgtccaccacacgaaggatcaagactttttggaattcttgcacagactcttcgtcacgcaatttagctacttggctagcatagatttcttctgcacgtgcatacaagtaatcgataacttccttgtcagattttccttcaatatcgcttgcagaaatcgtatcttccggaaccaaattgtatttggcaaagttcagaatcgcttcaacgcgttcttccttgcttgagtggctggctccttcaacaatccgtttgatggtccgtttgatcatggccttgatttcaggcgccaagtcacggttagctgtgatgacatcatagcgttcagcgtagataatttcccgttgttcccgcatcacgtcatcgtattgaaggacttgtttacgggtatcgtagttgtttccttcaacccgtttttgtgcaccctctacctgacgggtgaacatatttgaacggatcactgattcttcttcgctcaacttgaagcgatcaagcactgctttgatccgttcagaaccgaaacgacgcatcaattcatcttcaagagacaagtagaattgagattcacctggatccccttgacgtcctgaacgtccacgaagctggttatcgatccgacggctttcgtgacgttctgtcccgatgacacaaagtccaccgagttcgcgaacaccttcaccaagtttgatatcggtaccacgtccggccatgttggtcgcaatggtaacagcaccacgttgaccagcgttcatgatgatttgcgcttctttgtagtggtttttcgcattcaaaacttcgtgagggacacctgcttgaaccaacaattgagaaaggtaatcactggtttcaacggcaacggtacctactaggactggttgacctttttcatgacgagacttgacatcttccacaacagctttgaattttgatttcaagcttgggtagagaaggtctggatgatcaatacgggcaatcggacggttggttggaattggaatcacgcgaatgttataaatttcacggaattcttcttcttcggttttccctgtccctgtcatccctgacaacttcttgtacatacggaagaggttttggtaagtaatcgacgcagatgttttggtttcttcttgaactggaacaccttctttggcttcaatcgcttggtgaagtccatcagaatagcgacgtccttccatggtccgaccagtaaattggtcgacgatcaagatttcttgatcttcgctgaccacatagtcgatatccaaaatcatgatgtagttggcacgaagggcattgtcgataaagtgagtcaaagctacgttttcaatatcgtacaagttttcaagattaaagtagctttctgccttatcaatccctgaatcagacaaaccgatggttttagatgggacatcgataatgtaatcgtcctctgtcaaggtcttcacataagcatccgccatgtggtagagctggctcgtatcagaagctgtctgaccagaaacgatcaacggagtacgggcttcgtcaatcaagatggagtctacctcatcgaccaaggcatagttcaatggacgttgaaccatgttttctgcacgcacaaccatgttgtcacgcaagtagtcaaaaccaatctctgagttggttgagtatgtgatatcacagaggtaagcttcttttttctcagctggagattttgctgcaaggttgatccctactgaaaggccaagccatgagtaaagttctcccatctctgttgcatcccgctctgtcaagtattcattgacggtaacaacgtgcacccctttgccagacaaggcattcaagtataccggcatggttgctgtcagggtttttccttcccctgtacgcatctctggaacgtcaccatggtgaaggacgattccccccatgacctgaaccttgtatgggaacaaaccaagaacccgttttgcagcttcacgaacaactgcaaaagcctcgtacaagagatcatccaaagactcaccgtcttggtagcgttgcttaaactcaactgttttcgcttttaattcgtcatccgtcaaagctgccatttggtcttcataagaaaagaccttatcagccattttttcaaggcgtttgatttcgcctcgatcattttcaataattgtttttaataaatttgccatttttttccttactttgaatttttcaaaatctaaaatgttctttttattctagcattttttaaacattttttcaagatcaaggctgtatcttacaagactttcgagtggtttttttcgtgtaagaaaatccaaaaagatgcctgctcaagcagacatcttttctttagcgatcgttattcagataaatggtaagaatagcttgctacaaccacttcttcatgccatcgaagtgcgtacttcaatttcaaactcatttggttgtggagaatattttgccaatgttttttagggataaattgaggaactaagactgtgacggtgttgcctttttccttggcctcctcagctacttttgagacaaattcaactgttggctggataatatcccgataacttgtcatgacattttcaaagcgaatatgagggaaataatgcttaaattcttctgctacctcagcatctttggccttggtttcttctgttgagacgtgcatagctatcacatcgtttcctaggctatttgcataactcatagctcccacacttacctgagtgacattcccaacaaggacaatcacggtattgcccgcataacttgtcttttcgatctgacctcccaagcgcaattgggccgcaactttatcatagtgattacggatactcaagaacatccaaagcaagagaccaataatagggaagaagggccagatctcacccaaacggaataataagaggatcaagacaatcccataacagatggctgcccccaggatattggcaagcgaatacttaagaaatcctttttgatattggcgtttccagtggatcaccatccctgtttgagatagggcaaaaggaataaagaccccaatggtataaagcggaatcaagctttctgtttgcccatcaaaaatcaagagcaagacgatggcaccaatcgccaaggtcaaaatcccattagaatagcccagacgatcccctttttccatatacatgtgtggcatgtatttatttttagccatgttaaaggccaacattggaaaggcagagaatcctgtattagccgcaactgccaaaatcaaggctgttgacaattggaagacgtaaaagaaggcttgtccgactggggaattccctaagatggcttgggccatttgggctagagttgttatccctttagctggaacgacacccacccagtaattgaggaaggtaatccctgcaaacatgatccccaaaatcaaagccataatggtcaaggtagaggctgcattctttgcttttggtttcttaaagaaaggaaccgaattggagatggcttcaacccctgttagggaagcggatccactcgtaaaggcccgcaataagagaatgacactaacccctgaaatggtttgacccacatgagcagttgcgttataggccaagtgacccgtcaagatttggatcacgccatagccgatcaaggcaatggtactgacaatgaaaaggtagaccggaatcatcaacgatgtcgctgattcgcgtagcccccgaaggttcatcagcatcaaaatcaagaccaacaaaatggaaatgtgaagattataaggatgaagagatggaatcgctgacgtgatggcatctgcaccggaagacacagatactgctactgtcagcatgtagtcaaccaagagactaccaccagcgatcaaacccgctttgggagacaagttctccgtagtcaccatgtaggcccctcccccttgagggtaggcatgaatgacctggcgataagaaatcgttaaactggctaggagaaccaggaccacaatcccaatcggaatggaccaccaaatagctcctgctgatacggtcatcaagaccaagataacttgctctggaccataggcaatagaagaaagtgcgtcactagagagcatggccaaagcctgcattttccctagcaatccgccttcaccttctgcaccagatttcaacggacggccaataaaccattttttcaatgttgaaaacataaaaaactccttgaaaaaagatcatgaggccgggaattccctgcctcttttcataaaacaggggttattctactcctttttttcaagactgtcaaccaaaattgtgaaattctcataaagttttcattgtgttcatttatccaacctctcttagatcggtccgcttctttcaaattgatccaagcaaaaaacgagtctgggacaaaaatcctagcctctcaattatttttggattgtcgagcaagacgcagtggttgagtgggctctactacgctgatttcatcagcttttacagccctactcaactgtgcggaggtgggacgacgaaatcgaattctaacgaatgaccgatttctgtcccactctcacttttttattttgcttgattttcgacataaaaggcaatgacatccgaagtgtactgggctgtgccaactccaaacttgtcgatgttttccttgaattctggattatagacatagcctttgccgatatggccaaaaacctctatagagcagtcaaatccatacgttcgaatcgcgtctaaaagtttggcggcttgatcttggttttcatttgctgatacgggtagtccatctttgagattttgagccaaagtttgaaaaacttggttgaaggcttccgtagcctcatcttcacgccccttttggcgctcaagcgcttggtccatgacttcttgaccgtacttatctaccgcctcttggtggtatttttgagtatcttggtaactaaatcccgtaaatttttcctcaatggtcatttttctttctcctttttgttcttgaatggttttttgcaaggtagaaatcaaggtatccagacgttgtctttcttgagtcaaatagtccaactgtttggtcaaatggggcaataagttagatttttcttcggctaagagttctgctatttggtctaaggaaaatcctagatacttgtagtagagaatcacctgtaatcgttctaaatcttcttgactgtatgtccgataaccattttcagatttgacagggacgagaagtcctatcttgtcatagtggtgcaaggtcttgacagagacacctgacagctctgcagcttctttgatatggtacatgatttcctccttatactcaatgaaaatcaaagagcaaactaagaagctagccgcaggttgctcaaagcactgctttgaggttgtagatagaactgacgaagtcagtaacatatatacggtaaggcgatgctgacgtggtttgaatttgattttcgaagagtattacatggatagtataatccctccccttaggtcagagtcaaggctaaacataaaaattgttttcagataaaaaaaggcttgagttgtttcacaacttttaactcaaaccccttcttttttatggatgacttacgattaattctaaaccttgcccttccaaagtccaagattcaacatcgctcggtaagataaagtggcttcctttttgaataggataatccgttccatctaccgtcaatttcccttctccgactaagacgctcaataagctgtaatcagcagtcttttcaaaatcagcttttccagtcagttcccacttataaacggtgaagaaatcactggcaaccaaggtggtcattcgaagatcatcgatgacaactgtatctggatggctattggcaggctctccaatgttcaagacatcaattgatttttccaagtgaagttcccgcaagtttccttgagcatccttacggtcaaaatcataaacccggtaagtggtatcactcgactgttgagtttcaagaatcaagattccagaaccaatagcgtgcatggtcccgcttggcacatagaagaaatctccagccttaacaggaacttttgtcagcaaggcatcccagttcttgtcctcaatttgctgacggagttcttcttttgacttggcattgtgtccatagataatctcagatccttcatcagccgcaatcacgtaccaacactcagtttttccaagttctccttcatgctccattgcataggtatcatccgggtgcacctgtacactgagccaatcgttggcatccaaaatctttgttaataaaggaaagacaggctctttacgattaccgaataattcccgatgctcttgatagagctgatccaatcccattccttcgtatggaccattggctactttagaaactccatgtggatgggctgaaatcgcccaaaattcaccgacatggtcgctcggaatttcgtaaccaaattcttctttcagacgagttcctccccaaattttttcctgcatgactgaatgtaaaaataatggttgtcccataatatcctcctcgcatttcatgtttctattatacaaaaaaaagaaagtttttgaaagccctttccatcactttcctctctcgccagaaacttcatttttgtgtataatgaaagggatgacactaaaagaaaacattatccaactggcgcattctattgggatttcaaaaattggatttacaactgctgatgacttcgcttatttggaaaaatcgctccgcttggccgttgaggaaggacggaattctggattcgagcataagaatattgaagagcgcatccaccccaaattaagtctctcctccgcaaagaccatcatctcaatcgctgtcgcctacccccataaactcaagcaacaacctcaaaaaacagcctataaaagaggaaaatttacgcccaacagttggggattagactaccattatgttcttcaagacaagctcaaccgcttagctgctgggattgaagaaatgacgcaggattttgaatacaagggcatggtcgatactggagcactggttgatacggctgtcgcccaacgagcagggattggctttatcggaaaaaatggcttggtcatttcaaaagaatacggttcttacatgtttctgggggaattgattaccaacctcgaaatcgaaccagatcagccagtcgactatggttgtggagactgtcgacgttgtttggatgcttgtccaacctcctgtttaatcggggatggctctatgaatgccagacgctgtctgtccttccaaacccaggacaagggcatgatggacctagaatttcgcaagaaaattaaaacggtcatctatggatgtgatatctgtcagattagttgtccttataacaaagggctagataatcccttagcaacagaaatcgatcctgatctggctcatccagagttgattccttttatcgagctgtccaacggacaatttaaggaaaaattcggacatgttgctggaagttggcgaggcaagaacatcctccagcgcaatgccatcattgcattagccaatgccaatgaccgttcggccatccctaagctcctgaacatcatcgaaacttcacaaaatcagattcatattgcaacggctatctggtccttagggcaactgcttcgtgaagtcacgccggaccttgttgagctcttacggaatatcaaacatccgaccgatgctatcatagaagaacgaactgctttctttgaaaaattcggcattcaagcagattcacagctacaatgaaaaaacactaaggttgtcaccttagtgtgaaggcgtatacaaattgctattttatacaaatctattaacttctgtaaaaataaaaaaatttattcgttagaattattcaatcatcaactgaaactttccgacgtgagaaaagctcttgaaacttaatagtttcaagagctcgggagttttgagaccttaggctcaaaactaagtcatggaacttcttcgaagttcgctgacgtccgtagtcacctaaggaaagtttctaaaatgactttgtcatcaatctgacactaaggttgtatccttagtgtttttttagttctttcaagaaataccaactacccatctctacttggttaaagcaaatctcacttgaatagacttccttgtaaccatttttcgtgtaaaaatagacatttcctttggtattggtataaaaggctagtttttttccttggatctcttccaagaaaggctcaattccttctatcataaagcgactgccatagccctgccgttggtgtttaggggcgactgcaagaagcatcaaataccaatcaaaatctacattttgctccaattccttatccgtgtcctccataaatttaaagtaggacaacatattcttcaaggaaataaacttgagcaaaccgaatcccccatttaagagataggcccgaaaagggatcggttccttttgcaacaaggcaactgcataaatttcatcatttttttctgccacaaggcaaatatggtgcttaagaaaaacctttaccaggatgcgcatcattgcctcaacaaaggatgggtattgcttgggatcccgaaccaaatccttgataacttttaaaaatagatagtcctcaaaggctgtactggctactcgaaccacctgatccagatctgctttttctgcttttctgtacttcatcttctctcctattctaagtccactttccagtatacactatgatacgctgttagacaaaggtcaattttcagcaatttgttcattcaagccagcaaaaagagtcctccccagacgagtcccagcccccaagcgacgaggacatccttgggataatgaacccctccaagaactcggacaagggctaatagaagagataggagcatcgagcacattcctagcggaagcgacaactggcagacacacatcgagataatggtcgccgaaaaaacatgtcggctaggaaaggaatgtccggatgaattcttttctaataagggttgaatctcccatttctcataaggtctcggaacattgacccaatgacgaaagaggctaaacaagacaaaacccgaagcagggatccagataaaaggccagatgcctcccattgaagttttcttaaaaaacagccaacaaaagaccaggccgtagatgcctggcatcacgaacgtcaagattcgattcatcctttgaagaacctgcacacgatgtggctttctcgtaaaaggcagggttagccaacgataaaatttcggataatcttgaagattgggcttcatgtcggcactcctgtctttcatcttattttatactactagtatacgcgatcctaagaaagcctgtcaagccaggctctttttttatcctttctttcttctttttcacattagaagcgatctatttttgacgctttgtcatttttctgtacctaagaatcgtctttcccattactattatcgataaaaaaatgaggctgggacaaaagtcctagactcttaattgtttttggattgtcgagcaagacgcagtggttgagtggtctctactacgctgatttcatcagcttttacagccctactcaactgtgcggaggtgggacgacgaaatcgaattctaacgaattaccgatttctgtcccactctcattttttcactttgtatgttacgccctttgtatcttgttggaattgaacacgggctgcagattgtgtcaaaaagatgaatcctcctagaatcttttggattcttcgtcgtattccctattttgactgtatccgctacgccctttgtatcttgttgttacgctacttcttctgtgaattggctattgtagaggtcggcataaaatccattttggctcatgagttcttggtggttgccttgctcgataatatttccatctttcatcacaagaatcagatccgcattacggatagtggacaagcgatgggcgatgacaaaggaggtccggccttccatgagtttgtccatggctttttgaatcaactcttctgtacgggtatcgacagatgaggttgcttcatccaagataaggagcggagcatccttcaagagggcacgcgcaatggtcaaaagttgcttttgaccaacggacaaggtcactgaatcatctaatacagtatcatagccattcggcaaggtccgaataaagtgatggacaccaaccgctcgggttgccgcttcgaccgcttcgtctgaaatatcggtttgattaaagaccaggttttcccgaatagtcccttcaaagagccaggtatcttgcaagaccatcgaaaaggcatcatgaacttcttcacggctcatggccttagtatccacaccatcgatggtaattttaccagcttgaatgtcgtaaaagcgcatcaagagattgaccatggtggtcttaccagcacctgttggaccaacaatagcgaccttttctcctggcttcgcttcagctgtaaagtcatggataatagtcttatctggtgaataaccaaagcgaacatgctcaaaggtgacgtgaccttttggcgcttccaattgacgtgttttttgggattcatcttccatttcttcttcgtccaagaattcaaagacacggcccatagcagcactggctgattgcaattgggtaattccttgggccatttgaccaattggttgggtaaagatgcggacataggtcataaaggccacaatggtcccgatggtaatatccccattaatggtgaggacagccccaacgatacagaccatgacataaccaaaattccctacaaactgcatcaagggcatcatgattccagagaagaattgagatttccacatgctatggtacaaatcttggttgatggcatcaaaatgatctttggcttgatgacggccattataggaaatgacgacattgtgtccactatagatttcttcaacatagcctgaaactttggcaagattatcttgttgctgtttaaacaaaggctgacttttgaccataatgatgctagaaagagcaaagcctgcaaagacggaaaggatagcggtcaaagctaagtgccagtccgtcttaaacatcataaagatggagccaatcaataagacaatagaggagaccatttgaaccaaactttggttaaaggattgagtcatcaaatccacgtcattggtcacacgagacaaggtatctccttgttcatggctatcaaaatattggagaggtacacgattgatcttttcagcgatggcattgcgcaagcgttctgcgaagcgctgaatcatcgttgagataatgaaactactgctgtaggacaccagtgctccaactccataaaggatagccaaggttagggcaatcgaagtgattttgtcaatatcaatggcgcctcccatcccttttgtgatggtatccgtgatttcttttaatttatccggtccaataaccgtgataatactcgatacgatcgaaaagaggatagcaactaggaaaaataggtggaagcccttcaaatagggagaaagttgtctccaaagggacgattcttgttttgttttatgcatgttccaactcctccttagacaattgtgaataggcaatttcttgatagacttcattggtcgcaagcaattccttgtgggtaccttgaccgacgaccttcccttgatccaagaccaaaatcaaatccgcatccataatggtcgaaatccgttgggcaacgatcaatttggtcgtatctgccaactcttcttttagggcttgccgcaagatacgatccgttttgtaatccagggctgagaaggaatcatcaaagatgaggatctcaggcttgcgtgcaagggcacgcgcaatggccaaacgttgacgttgtcctccagagaagttgcttcctccttgcgctacttctgtatccaagcccttctcttttgtggcaacaaactctttggcttgggccaattcaagagctttccagatggcttcatcctctaattttccttgactactttctccaaattccatattggagcgaatcgttccactaaagagcactgctttttggggaatatagccgactttattgttcaattcttggtggctatagtccttgacattgatgccatccactaagatctttccttctgtcgcatcgtaaaaacgtgggattaaattgaccaaagtggatttcccagagccagttgatccgatgaaggcaacagtttgtcctttctgagctgagaaggtcacatgctcaatcaccgcacgggaagtccgtccatatctaaaggaaacatcttggaattctacggtacctgcttggtctgttttttcttttgactcacttggaaaggctacagacggttcaagagccaagacctgattaatccgttttgcggataccaaggcacgaggaagaataatcaagatggccaccatcatcataaagccaacgacaacctgcatggcataagaggagaaggtgatcatatcggagaagaccttggtccgatccgctaatgcaggactggtgaagatctttgtaggatcttttggcatggcgatatcattgatcaagtgcgccccgatccagtagatagcaagggtcaagccacttgataccactgtcatgacagggttcatcaaagacatcaaacgataaacaaagagatttagacgggttaagcccttgttttcagcctggaatttttcattttgataagcttccgcattgtaggcgcgaacgacccgcaccccagtcaaactctcccgtgtcgtcgcattcaaggcatcggtcaagccttgaaccttttgctggcgcggaaaggcaataagaaccagaacagagagcagaatcaagaccatcaagaccgcaatcccaacagaagttgtccaggcactgctcttgccccaaatcttagtcaaagcccaaatcgccataataggcccacgcgtcacgacctgcatccccatgacaatcatgatttgtaactgggtcaaatcattggttgtacgagttaagagagagggaacggagaatttcttgatctctgcatcagagtaatccatcacctggtggaaaatctctcctcgaagccgcgtcgtaaagctggcagcgactcgtgaagccaaaaagcccacaaaaactgccatcaaaaagcttccaaaggagaaaagcaacatcttgcttcccggatccataatctccgaaaccttggtcccatccttagctaagagggtcgtgatatcagataagtattcaggagtctttaaatccatccaaacagccagacagataaagaccgtactaagggcaatcatgccccattctttggcggttaaccgccgaaacatattgatcattcctcgctcctttttttcatattctcataaaattgatgcatgaccttgaaaaagatggccaattcttcttctgatacaccagccatcatcttctggtccacttcctcaaagaattgtttcatgtcattcaacttatttttcacaccgtctgttaggtagacatacttggcccgtttatctgtcggactagcctctaaataaataaagccatttttctccatccgcttgatcaggttactcgtcacggattttgagatatgaagttcctgctcaacatcccgaatcaaggtcacttttccctctttctcacgatgagataaaaagctcaatacctgaccttgtggtcctgcggtaaattcaaaccctctcttcttggcttctctttctaccatgaggtggatcagatgccctagttttctaaattcttgtaaaggtttgtccatcatttcctccaaatagttctcttaagaactttaaagttactatgagaactattttaacacaaaaaagatccctgtcaataaaaaagtttccataagaactaaaaaaatggagcccaatcgactccatccttcatctttagataataatgccttctagatgatccatttcatgctgacagatctgggccggaaagcctgacaaatgaattgtttttgcattccaattcacatctcgataggtcactgtaatctcctcataacgggtggtcggccgactccccaccaaggacaagcatccttcctctgtttgataaggcttgttcttttcaaggagaaccggattaaacaggaccagattttcacttcccattcggatgataatcgcccgttttttcaccccgatcatattagccgctaaaccgacacactcaaggagatgagcatttaaggtgtcctgcaaatccaaagccaaggtgcgatcctcaggtgtcgcttcttcagacttttgacccaagaataagacatcttttacaatattctttttcattccttcctcacttcttgatagatagacgaaagaagagagtgggacagaaatcggtcattcgttagaattcgatttcgtcgtcccacctccgcacagttgagtagggctgtaaaagctgatgaaatcagcgtagtagagcccactcaaccactgcgtcttgctcgacaatccaaaaataattgagaggctaggacttttgtcccagcctcctcgctcttgtttctaacctctaagagacaattgctacttattttttaagcttctcgctcacttcttttgcaagaacaaagttccccaaggtcgctgaaccattgccagcaactgcaggtgtcacaatataatctctcacatctggtacagggaggtaaccgttcaataaagctgtaaatttcgtccgcacacgatccagcatatgttgttgagccatgactcctcctccaaagacaatgatgtctggccggaaggtaactgtcgcattcactgcagcttgtgcgatgtagtaggcttgaatatcccatacattgctgttgagttcaatgttttccccacgaatacctgtacgagcttcgagacttggaccagccgcaaagccttccaaacagccattgtggaaaggacaaacacccttgaattctttttctacatccattgggtgttgagccacatagtagtgtcccatttctgggtgtccagcacccccgataaactcaccacgttggataacaccagcaccgatccctgttccgatggtatagtaaaccaagttttcgatgtgggcacccgcattattacgtgccaccacttctccataggcagagctattcacatctgtcgtgaaatagatgggtacatttaaagcacgacgaatcgctccaacaatatctacattggcccaatttggttttggagtcgttgtgatgaaaccataagtgtttgaatttggatcgatatcaattggtccaaatgatccaatcgcaagcccaactagatcctcaaattttgagaaaaattcaatacacttatcaatcgtctcaattggcttggttgttggaaattgtactttctcaatcacattgtagttttcatcaccaaccgcacaaacaaattttgtaccgccagcttccaaacttccgtataattttgtcatgttggctccttttttattatgaaaaatatcctgtatttattatagcatattttgtagtcaatctttttctcttctctaaagaaaaaacacactttttttgagaaataaaattcaaggactggagatgatagaccagtccttgagaacttatttttcgattaagctttgacttcgatgatcgcatcccccttcgcaacagatccagttgcaacaggtgtgacagaagcaaagtcagctgtgttagtgacgatcaccatagttgtgtcttcaagaccagctgcggcaattttcgctgcatcaaatgtaccaaggacttcaccagctttgactttatcgccttgagctactttttggtcaaatccttcaccattcattgatactgtatcaatcccaacgtggatcaagatttcagcaccattagctgttttcaaaccgtaagcatgtccagtcgcgaaagcaatggttacttcagcatcagctggtgcatagacaacgccttcagttggtttgatagcaatcccttgtcccatcgctccacttgagaagacaggatcattcacatcagacaaagcaacagcttgaccaacgatcggagagataatggtttcgtcttgaagagatgctggaagagctccagttgtttcttcttcaataatagcttctgcttctttgtcctctgcaggaactgatgaagcttcatcttcataaccaaacatataagtcaaaccgaaacttagggcagttgtaaatacaaccataaatacatatttcaataattgaccgtttagatagagaagcgttcctggaataattgtaataccaaatcctgtaccagcaagatttaacatagatgcaatccaaccacctactgcacctgctcccaaagcaataacgaatggtttcacataacgcaagtttacaccaaagattgcaggctcagtaatacctaacaaggcagagatagttgcaggaaatgctagagctttcactttttgagatttagatttcactgccactgctaaagtagctccagcttgtgcagtcatagccgctgtaataattgcattaaatggatcttttttatctgcagtaattaattgtgattcaagaagattaaagatatgatggacgccggtaacgacaatcaactgatgaacgccaccaataagaagacctgcaagaccaaatggtaaattcaaaataaacttagttacatttagtacatattcttcgatactgtggaagaatggaccaataataaacaaagcgaggaatgacatgattgtcaatgtgaataatggaaccaataacaaatctaagacatctggaattttcttatggagccacttttcaagtttcgcaccaattagaccaacgaagaaagcgggaagaactgagttctggaatccaaccacatgatggaagataccaaagtatgttgctgctttagaaggatcttccgctacaacccacgcatttggaagtgtcggactaaccatcatcaaaccaattacaatcccaagaacaggatttcctccgaatactcggaatgcagaccatgaaatcaaggctgggaagaaggcaaacgcggtatcagttaaaattgttgaataggtataaaaatcagtagatttaaatgcatctgctgttgtgccaaacaaagccaaaacctggtcttgagcaatggcaccacgaatccccataaacaatccagtcgcaacaattgctggtagaattggaacaaaaacgtctccaaaggtacggatcgcgcgttggaaccagtttccttgtttagcggcttctgctttcatttcatcttttgatgatgttggtaagccaagagctactacttcatcatagatcttgtttacagtaccagtaccaaagatgatttggtattgacctgagttaaagaaagcaccttgtactttttcaatgttctcaacaacatctttgttgatttttgattcatcttttaccatcacgcgaagacgagtcgcacagtgagcaacactgctaacgttctcaaccccaccgattgcatcgatgacctgctttgcaatttctgtatttgacattttgcaaaaatctccttattttttgtaatgtaaacggttaaatcgtttctacgtttttaattgtaccacgtattgaaaatatgtcaagcgttttgcaggatttttttgaaacttttttggactttttgacaccttttgacagtatgaaactattttcattttaaaacaggcctgtactacgctttttagcactttaaatcagacttttattttcattttctttcatattttcataaattttcaacttctcctcttttcttcaggctgcaaaatagctgtcaatcgtttgacattttttgccatttttttcatttattgcttgcatttttaataggaaatcgttactatggaagtaagaaaaaattcggaggaataaaatggaatggacaactgaacgtcgttacagacgttacgaagactggacaacagaggaaaagcaagccatccaagatcatatggccaaatctccttggcatacacactatcatgttgagccaaaagcaggtctcttaaatgatcctaacggtttttcctactttgatggaaaatggatcttgttttaccaaaatttcccatttggtgccgcccatgggttaaaatcatgggtacaaacagaaagtgaagacttggttcatttcaaagaaactggggtaacgctttttccagacactgaactggatagccatggcgcttattccggatcagccatgcagtttggtgacaaactattcttattctacaccggaaatgttcgtgatgcagaatgggttcgtcatccttaccaagtcggtgctttgatggacaaggacggaaagattgaaaaaattgacaaaatcttgattgatcaaccggctgactctacggatcacttccgtgacccacagatttttaatttcaagggtcaattctacgctatcgttggcggtcaagaccttgagaagaaaggattcatccgtctctataaggctgtagataacgactataccaactgggttgcagtcggtgacttggattttgcaaatgaccggacagcttatatgatggaatgtcccaacctagtctttgtaggagaccaacccgttctcctatactgccctcaaggcttagataaagctgttctcgattatgacaatatctatccaaatatgtacaagattggggcaagctttgacccagaaaaggccaaaatggttgatgtatctgaattgcataatctcgactatggttttgaagcctatgccactcaaggatttaatgctcccgatggacgtgcctatactgttagctggctaggtcttccagacgtttcttatccaacggattcctatgactaccaaggagctctctcactggtcaaagaattaaccatcaaagatggcaagctctaccaatacccagttgaagccatcaaagacttgcgcgctgagagtgaggaatttgccaacaaggcacaaaccaagaactgctatgaattggaattgcagtttgaaaaggatagccagaacgaaatcgtcctctttgccgatgcagaagggaagggcttagctctcacatttgatctggctaaaggattggtcacagtcgatcgaagccaggctggtgagcaatatgcccaagaattcggtgcgagccgtagctgcacaatcgctaaccaagcaacaaccgctaatattttcattgacaattcgatttttgaaatctttatcaataaaggagaaaaagtattttctggtcgggtctacccacatgcagatcaaaatggaatcttgatcaagtctggaacccctactggaacttactacgaacttgattatggtcgcaaagctaactgatgtcgccaaactcgccggtgtcagccctactactgtctcacgggttatcaataaaaaaggatacctgtctgagaaaacgattcaaaaagtccaagaagccatgcgagaattaggctataaacctaacaatgttgctcgaagcctccaaggaaaatcagccaagttagtcggcttgatctttcccaacatcagcaatgttttctatgctgaattaatcgacaaactagaacaccaactcttcaaacatggctataaaaccatcatctgcaatagtgagcacgactccgagaaagagcgcgaatatattgagatgttggaggctaaccaggtagatggcatcatttcaggaagtcataatttgggcattgaagattacaaccgggtaactgctcctatcattgcttttgaccgcaacctctccccagaaattccggttgtttcttcagacaactatgctggtggagtgctagcagcagaaactttagtaaaaaccggagcccgaaatattatcatgatcacaggtaatgacaactctaactccccaactggcttgcgtcatgcgggatttgcatcagttctacctgagtccatgatcatcaatgtttccagtgatttctcccctattcgcaaagaaatggaaatcaaacagattttaacccaccacaaaccagacgctatttttgcctccgatgatttgacggcgatcttgatcatgaaagtcgctagagaattagatattcagattcctcaggatttgaaagtgattggttatgatggaacccagttcatcgagacctatacacctgaactgacaaccatccaacaacccctcgaagacattgctatcctcatggtggatcttttactccaaaagatcgaaggaaaaaaagtagcgactaccggttatttcttgcccgttagtctccactctggaaaaagtgtctaaaagcaatatcccctcagtagaaactgtggggatattttttaccaaaaaaagagccatcggctcttttttaattattcttctgtcacaaattgactgaggacaccgttgacaaatcgtgaagaggtttcatctgaaaaggccttggccaattccaccgcttcattgactgcgacgatctgtggtgtatcaaactctgtcatttcataaattcccagacgaaggatatttttctctaccaaggtcaagcgctcaacagtccagccggttttcaaatgttgaccgatttgttggtctagttgatcttttgactgatagacacccgtcacgagattcatgagaaaggcaggaagatcgacttctttgtcttctgctaggtccttgtcatgtagataagcaaagcgacaagcttcaacaatgtctccatcgtattccaaggccatcaaggcttggaaggcacgctcacgcaaatctcgacgtgattctaataaaatttcatcagtcattgaggaagtcctcattaaacaagtctttcaagtctggttttggagatttttccgttgcgataccaacaacgtgaatgttgacagcatccaaggttacatctgccatatcataaactgcagacttaaccgctttttgaatggctacagcgacagatggtacagccactccatattctaaatagagatagatgtctactgaaacttgaccatcttcttctgtatgaaggtagacgccacgtccaagggagcgtttggataagctatctgaaacactcttgttttcaagcgaatagacaccctctacttttgctgtcgcaatcgcaataattttttctaatacacgtggtgcaataacgatgtcaccaaattgttcagttgccatagaagttcctttctatttgacaccctgagatgtctcttatgcacgagaaacgtaagttccttcagtagtgttaatgaccaatttttgtccagcttcgatgaagtcaggaacgtttacgaccaaaccagtttccattgtagcaggtttaccagaaccagtcactgtagcacctttgatagatggttgagtttctgcaacagttaattcaacagttgtaggaactgttacaccgatcacttcgcttccgtagaattgaatttttacttctgaattttcaaggatgtaaagcaattcttgttctacattcacaactggaatttcatattggtcatatgtttccgtgttcatgaagtaggctgtatcatccattttgtacaagtattgagctgggacagtttcgataatcgcttgttcaaatttttcttctggacggtagcttgtatcaaatgttgaaccagtacggacatcacgcaatttcatacgcatgatagtgtttcctttacctggtttgtggtggctagcttccaaaacgcggatcaattttccgtcagctgtttcaaaagtcataccagctttcaatttacttgcttcgatcatgttttattacctcttttttaaaaatagattactctttattgtaacacactatttgatttttctcaaacagcaattttctctttttcggaaggctagaaggcggagagagattacaggaacgagtccttagaatctctatatctccaactccatcttcactattccttattggtccacaggcacaatattaccatccgcatctttggtgacatggacatattttccatctacttcaatgtagaaggtatgtggcttgtcttgagctggagaggcttgtttttgaaggtcattaccaagggattgacccaaattcatccccatgatcatgttcatgccattgccaccttcatttttagcagctgcgaccaaagcttcattgcgagcacgacgttcttcgatttcaatggtattgtacttcatcgccgccaattcactgtccagtttattgaccttggccatactgtctgcatcatagctcaaatcttcaatgaggacattggttaattcgataccatataattctgtccaagttttgttgacttcgcgttttgcaacttcattaaaaacatcttggtccgcattgatgttgtaaatatccgccttattttctgctgtatattttgaaatggccactgcaatttttggtgccagattttggcgcaaggtgccctgagccacatcttccaaggtaaacggcttatctgcagtgatttgacgactgactgcactgatgtaaaagagtacaggatctgccactttaacatcataaagaccataaaaacgaatactgagaagctgttggtaacggtcgctaaagtactcgactggattttgagtgccaaatttatttcctgtaaaaggttgcatccgcacaaaaataatttcttgttgggtgaccacttggcctccaaacgagaagcggttcttgaactgatcccacgttcctttcacaccacctttttcaaacaaccaggcattttcaccggcttgccattcgtggctccctgcttctagaaggtctcctagaaacgttccattattgaccaagagagcaacatagccttgaggaacaatgacaacagatccatctgtcaatagacctgtattttggttgctctggcgagagcgcccatctggatctttggtcaagagctgtcccttaatggccaaagctgttgctggaacagcttctggcaaggtaatggcttccttaaatttactatcttgaaaacttgaaatgcccgctgaaagggctgctttaataaatcccatacattctcctatctgtagaattcaatttcatccacaacttcgtagacatccaagacccaatcttttggattgtgcttcaaggatgcttggcaatattcacacttgtcgattgaatcgatggtcagtggcgcaccacagttcggacagtgatcactaacgacttctgaattcttaatgatctctgtctgagctccatgttcacggaggaagaccatgcggtaaacggtaaagagatctttggttggatccccttcgatcacacgacccgtttcatcacttcggatgtaatctctcatcgtcgatgacagaatgacttcaatgcggtcattgccttctggattttcgataaagtctttgatcttcgaatcttccacacgcacgcgctcaagaacattggttgttttggcgcgaatatgctcttgcaactgcgtcaagtgctgctcataaagactggtactttctaagttccgcacagaattccaatctttttctgtccaggcagactgcaattgaagataaactagtttgacttgcgataagaagcggtcttcatcaaacattggatccagtttacggatacggcgaatcgcttcatagttgttctcaattggtcgaccagcccgttcttcggttgtccgttttggaccactgtttgaagaaaatgattcatcactttcattagcttcttttgcaatattatagacaaatccaatcaatccaacgatagcaaaaattgctactacaccaccagagtctgttccagaatcagaactgtagctactggatccgccagaccaactgctgccaccagaccaactacttccgccatcggaccagctactgccactatcggaccaactgctaccaccacctgaatcaatcaagctactgccaccactatctgtattaccgacaccagcatgggcagaaggagcaaatacaaatagcaggactactagaagaattccaactattacacttcgttttttcataggcctcttttcttatctttgtttgttacacaggggttaagaaaatactgtctattttataggacaatcaattctttaggagcaagggtcaagacttcacagcctgtttctgtgatcaagaggtcatcttcgatccgcacaccagagagaccttcgatataaatacctggctcatctgttaaaaccatccctgcttgaatagcttctttagacgtttggctgaagtatggctcttcgtggatatctagcccaattccatgaccgattccatgagtaaagtattggccatagccggctgcttcgatcacatcgcgtgggattttatcaaaatcacggaagccaagtccatctttagcagcatcaatcaaggcttgattggctttcaaaactgtttcgtaaatttctctttccttgtcgctgacatgtcctgcatagatagtccgtgtcatatcactgacatagtggtcatacaagcaaccaaaatcaagggtcaaggcatctcctgctgaaatgacccgatcacttggagtcgcgtgaggcatggcagagcgttcaccagctgctgaaataatatcaaaagatacaccagaagctcccaactcccgcattctaaaatcgaggaaagtcgctgcttccaactctgtcgtttgccctaccttgatataatccaaaatatcatggaaggcttggtcagagatgctacaagcttttttaatggccgcaatctccgtttcatccttaatcaagcgcaattccatgacaaaattcgctagggattgaagggtaatgccactgaaaacagaagccatacgggcatggtaggccaccgtcacttcgtcctcaaaaccaagttctttgatgccaaggtccttaacgatctctgcagctgcagtcaactcatcgcgggtttcaacaatctctacaaaggggaaacaagtcgcatgggcatggatggtgtagcgcgaatctgtaaagagtaccacgcgttcttctgtcaccaaagcggtcccgtttgaaccccagaaattagtcaaataataaacatttttcaaattgttaatcaataccgctttgaggttttgggctttcattttgtttcttaagttgctgatccgttgattcattgtaattttcctttcaaatattgtcctgtgtagctggcaggatttgctgctacttcttctggcgttccagtcgcaataatggttccgccaccgacaccgccttctggtcctaaatcgatgatatggtctgctgtcttaatgacatccaaattgtgctcaatcacaaggactgtattgccatcatccacaaaccgctctaagactttgatcaagcgcgagatatcctccgtatgaagtcctgtcgttggttcatccaagatatagaaggattttcctgtagagcgcttgtgcagttcagaagccaacttcatccgttgcgcttcccctcctgatagagtcgttgcaggttgccccagcgttacatagcccaagcccacatcttggatggtcttgagtttgcgttcaatttttggaatgtgcttgaagaattcgactgccttattgaccgtcatatccagaacttctgcgatatttttttccttgtagtggacttcgagggtttcactattgtatcgacgtccatggcagacctcacaagggacaaagacatctggcaagaagtgcatttcaatcttgatgatcccatctcctgagcaggcttcacaacgcccgcccttgacattgaaactaaagcggccttttttatagccccgaattttggcttcattggtctgagcaaagagatcgcgaatgtcatcgaagacgcctgtataggtcgctggattggaacgaggagtccgaccaatcgggctttgatcaatgtcgatcaagcgatcgatatgctcaatcccctgaatcgtcttgtatttccctggtttttccgaattgcggttgagcttttgagcgatggcttttttcaagatgccattgatcaaggtcgattttccagaaccggaaactccagtgactgcgatgaattttcctagaggaaagcgcgctgtgatgtcttgtaagttattctcactggctcctgtaatttcaatatagcgaccatttcctgaacggcgctctgttggaaccggaatcttgcgcttgccggacaagtactggccagtgatggatttgctgttgcgcgctacctgctttggagtccctgctgcaacgatctctcccccaaagacacccgcacctgggccgacgtcgatcaggtagtctgcctctctcatggtatcttcatcatgttcgacgacgatcaaggtgttgcctaaatctcgcatcttcttgagactggcaatcaagcggtcattgtccctttgatggaggccgatagacggctcatccaaaatataaaggacaccagagaggttggaaccgatctgggttgccaaacgaatgcgctggctttctccacctgataaggtcccagccgatcgtgacagggtcaagtaattgagacccacattgtttaagaaggtcaatcgatccttaatctcttttaagatcggtcttgcaatcgtggcttcattgtctgttaagaccaactgatccacggcttttaagtggtccgcaatcgatagatctgacacttccccgatatgcatccccttttctcctccgacacgaacagaaagagcttggtcattgagacggtagccatggcaggtcgcacaggtcaattcgttcatataagagcgcatttggttgcgggtgaaatcactattggtctcacggaaacgacggtgaatattgtttacgaccccttcaaaaggaatctcaatatctcgaaccccaccaaactcattttcatagtggaagtggaattccttgccatttgaaccatagaggaccaagtccttttcttcttgagaaagattggaaaaaggctggtccatatcaacgccaaagtggatcatggcctgttctaacatctgtggatagtagttggaggagatcggattccaaggagcaagtgctccttcgcgaagggttaagcgatcatctggcaccaccaaatccaagtccacctctagcttaatacccagcccatcacagtctggacaagatccgaaaggtgcattgaaagaaaagaggcggggctctaattcaggaacggtaaagccacagactgggcaagcataatgctcagaaaagagtagctccttgccgtccatggtatcaatcaccacataaccatccgcaatccgaagagctgcttcaatcgaatcaaagagccgcgagcgaatgccctctttgatcacgattcggtccacaaccacttcaatcgtgtgctgcttgcttttagatagttctggaacctctgtcacatcatagatctcaccatcgacccgcacccggacatagccgtctttttgcaccttttcaatgatattcttgtgctggccttttttcttgcgaataataggagctagaatttgcaggcgttggcgctctggtaattctaagacttgatcgacaatttgctcaaccgaagaagcggtaatcgctccatgcccattgatacaataaggcgtccctacacgcgcatagagcaagcgcaggtagtcattgatctctgttgccgtccccactgtagaacgggggtttttactggtcgttttttggtcgatggaaatggctggactcaagccgtcaatggagtccacatctggtttttccatatttcccaagaactgacgggcataggccgataagctctccacgtagcggcgctgaccttctgcatagagggtatcaaaggccagactggactttccagaaccagacaaccccgtcaccacgactaatttgtcccgtggaatttccacgtctatattttttaaattatgggcgcgtgccccatgaatgacaattttatcttgcatgttcttactctaatcacctttttgttaacctccattataacaaattttttagtattcttttatccaaaaccgtcctttttctgatataatgttaaggtgtaaaaaaacaaggggaggcaccatgaaacaggtctttttatcgacaacgactgaatttaaagaaatagagacgctggaacccggtagctggatcaaccttgttaacccttctcaaagtgaatcgatggaaatcgcctctgcttttaatatcgatattgcagacttacgggcaccactcgatgcggaagaaatgtcccgtatgaccatcgaagatgagtataccttgattatcgtagacgttcccatcaaggaagagcggaacaatcagacctactatgtcaccatccctttgggaatcatcctaacagaagaggctattatcacgacttgcttggagaaattgccacttctcgatatctttatcaaccgacgcttgcggaatttctatacctttatgcggtcgcgctttatctttcagatcctctatcgcaacgctgaactctacttgtctgcgcttcgtaccttggatcgcaaaagcgagcagattgaaagtcaattgcacaaatcaacgcgtaatgaagagctgattgagttgatggagctggagaaaaccatcgtctactttaaggcctctctaaaaaccaatgagcgcgtgatcaagaaattgaccagtgccactagtaacatcaagaaatacctagaagacgaggatctgttggaagataccttgatcgaaacccagcaggccatcgagatggcagatatttatggaaatatcctgcactccatgaccgataccttcgcatcgatcatctccaacaaccagaacaacatcatgaagaccctggccctcgtcaccattgtcatgtccattccgaccatgatcttttcggcctacgggatgaacttcaaggacaatgagcttccgctcaatggcgaaccccatgccttctggctgattattttcatcgcctttgccctgaccgggtctctcgtcgtctacctcatccataaaaaatggttctaacacctactaataacactaaggagtatttatgtctcaatttgatttaactcaattaagtaaaaaaaatcaagaattcgttcgcatcgccaaacaccaattgcttgaaaacgggaagactgaggaagaagcagaaagcctcatccaagaaattcttccagctatccatgaaaaccaaggaaaaggaattccggcacggaccctttttggtgctccaactgtttgggcgaattctttcagcgagaaagaacgctatgaaaaagagcatccgaaattaaacgatgctccctctctcatgattttggattccttcctctttatctttggtgtttttgctgcgattagcgcctttatgaacttggttgcaccgcgtcgtactggctatggtttgatcaccttgatccttggaagtttgacaggggctctgctcttgtatctcatgtactacttcttctatcagtatatggatggcaccaaagatcgtagcgaacgtccttctctctggaaatccatgccgattcttgttggagtcatgttcctttgggttattgtcttgtcctttacttccttactcccacaggttctcaacccaactattccagatgtcctcgccatcgttttaggtgctttagcgcttgtccttcgcttctacctcaagaaacgctttaatattaaaagttcgagcacagcacccgcaactcgacgctaaaaagaaacggatgaagttttcatccgtttttgttttactgcatgttcttgttcaatctttttgaaaaatagaggactaagtcatcattgttttcacaagaactgtaagggtccaagggctgatccctaaaccaaactccagttccatctgggatatagtcccgtttgacatacagtctttgagctgggccataacccgagtgtaaaccaacccctaaagtaacaatctctgatagtagccggactcttttttccgcctcttctaagagttgattcccaattcctcgatttctaaatggctcaaaaacattaaaatcagatagttcaggatagactcctacgaaagggccgtgcatggcataaggcaatatagtgatataacccgccacaaatccatctgactcagctactaatacgtctctctttccgttctcctgatcctgaaaatagctagtcaagatatcctctctacctggccacccttggtggataaaggcttgagagatgtgctcaatatctgcctttatcatcctcctgatgattacaccttccttcatgttgcgctccttgatacctttctcttcatcattatagcataattagagcttgggaaaggtcaaagagcttcacacggacctaactcactatcacatttctatgctcgcaaaaaaagacccgttagggtcttactcgcttttttattttcaagctcgtgaaaaagaggtccactggacctgaaaaaaagacccgtaagggtcttttctttaatcttcgtttacgaaaggcatcaaagccattacgcgagcgcgtttgatagctgttgttactttacgttggttcttcgctgaagttccagttacacgacgaggaaggattttcccacgttctgaaacgaaacggctaagaagctcagtatctttgtaatcgacatattcgattttgtttgctgcgatgtaatcaacttttttacggcgtttgaatccgccacgacgttgttgagccatgtttaattctcctttatagttttaattcgttaaacccattcttagaatggaagatcgtcgtctgagatatccattggattagctccaaatggattttcttcacgaccaaagtttggcgctgcattgcttggttcagatccaccaaagcttggggttgcatttccagcaaaaccaccgttgcctgatgaatagccaccacctgcatgcccttcgcgtgctgcacggctttccaatagttggaagctgtctgctacgacttcagtgacataaacacgttgaccttgctggttttcgtaattacgtgtttgaatgcgaccggtaatcccaatcaaagcacctttcttagcccagttggctaagttttctgcttgctgacgccagatcacacagttgatgaaatcggcttcgcgctctccattttgactcttgaagttgcggttgacagctaggctgaaagtagcaactgcttgattgcttggagtgtagcgaagttcagcatcacgggtcatacgaccgacaagtacaacattgttaatcataagtcacctctgatgatttcttacgcgtcaacttttacgatcatgtgacgaagaatgtcaccgttgatttttgaaagacggtcgaactcgttaagagctacagcgtcgttcgcttcaacgtttacgatgtggtaaagtccttcacggaaatcttggatttcgtatgcaagacgacgtttttcccaatcttttgattcaacaacagttgcaccgttgtcagtcaagatagaatcgaaacgtgctaccaaagcgtttttagcttcttcttcaatgtttggacgaataatataaagaatttcgtatttagccattgataatgttcctccttttggactaatgaccccctgtctttgcaaggggtaagtgaggtttactcacaagaaactattataccagacttttcgaacaaaggcaagaattatctttaggatttgaaaaatgattctggacgtccccttcgataggaaagaaacatcccaaaaaaatgacattttatagtagaaacccctccccttctttctcctctttccttaaagaaaactgatatcagttagctttaagcttgagtctttatactagctacaacaaatctcaagaaacgaggaacgattatgaattatcttatcatccccgcctatcaaccggatctgaatcttgtcaaactggttcgcttggtccatgctaagagcgatctccacatcatcgtggtcgacgatgggagtgacgctgacaagaaagtgatttttgacaaactggacggtcttgcaacagtcctgacccacgagcacaaccaaggaaaagggcaatctctcaagactgcttatgcctacatcctagaaagaggtacctatggaagcattgttacagctgatgcagacggtcagcacaaaatttgggatattttcagggttgttaaccaatctcaagagcatcctggaacacttattctaggagcacgcgccttctctggaaaagttcctttgcgttctgctttcggaaataaattgactcgtttcttgtttaagcaacaaacaggggtggcggtcagcgatacccaaacaggcttacgagctttcactacgaatctcttgcctttcatgcttgaggttgacggacagcgttatgaatatgaaatgaatgtgctcctcgcagcaagcaagtccttccccatcgtggaagttcccattgagacggtctatatcaatgacaacgaaggatcccatttccgacctattcgagatggcctcatgatctacaaggacatgttcaagtttgccctctcctctctgagtagctttatcgtggattacctggtctacgccttcttccttttcgtgatgatggctgtgcccattagtcttcgcattctccttgccaacgggatcgctcgtgtgacgagttccatctttaactactcgaccaataagcatctggtctttaagaataaggacagtgtcgctaaaactggaagtggctactttggcctagccctcggcctctttattctcgatacgctcttgattcgactcttctatactgctttcgggctcaatctcctgatcagtaagattgtcgtcggcttcctcctctttctggtctcatgggtgatccagaaaaaagtgatcttcaaagaaaggactgctccccaccatgaaattctttaaaaaatcctacacctatgctgcctgctttggccttcttttgaccagcagttttagctactcgatgctcaagacctttgtcttatccgatgccatccaaaccgtaaaagctacgactacggacaccaaggcagccaaaaaagcagctgcatcggctacaacgacggatactagctattcagatgacaatatccaggtgagcctaacagaaaaaacgattgaaaatacccaggtttacatcgcagatatcacagtcagctcatctgactacctcaaaacagcctttgcacaaaacacttacggaaccaacgtgacggctaagacctctgtcacagccaccaacaacagtgccattctagcagtgaatggtgactattacggggctaacagtacaggatacgtcatccgaaatggagtggtctaccgcgataccgttcgggaagattcaagcaatggtgacctggccatttacaaggatggatccttcaaaattatttacgaagatgagatctctgcagatcaattggtcaaagacggggtcgtcaatctcctcgctttcggtccttccttggttgaaaatggagaaattaccgtcgataccaactcagaggtcgggcaatccatggcgtctaatccacggactgccattgggattatcgatgaaaaccactatattatcgtcgtgtcagacggacggacctcagaaagtgaaggcctgtctctctaccaattagcagaagtgatgaaatcgtatggcgttaaaacagcctacaacctggacgggggtggatcttctacactttacttcaatggccaagttattaacaaaccaactacaaatggtactatttcagaaagggcggtgagtgacattgtctacatcggttactaatcctatcaaaaaacgattgaaaaaaacgattctctggtatactctgatttcaactttcttcttcgttggaagtcgcatctatgaacactttagttttggcgaaacctcagccttcatgcactacctcttcttgattcctttgatcggtggtgccctactagtgcttctacagttgatggtgaaaggcctctctcgcctgagtctcaatctttggaattcaggagtggctacgctcacagccggagccctctaccgagggattgtcaacctctctggtcgatctactacaatggatcaaccctattattaccttggagttgcctttctagcactagctctgatcagcctcttctttgtccgcagtgtctgggtggagaaaacagcctaagacatcaaaaacgtccgtttctttatagaacggacgttttttgggagtaagttaacggatgaacgacttagccttcacgttttttgctggctacaaatcccgctaaaactagtgaggtcatgccaaagaggctaaggactgtggaagccaattcatcttgacctgtttttggaagaccggttgctggtgtagcaactacttccgcttgaccacctgtatgataagtgacagcgacaggtttgtttgttgccacttcttttgtttcgcttgcagctggttgagctggagttactgggctttcaggttgaggagttggggtaggcggagtaactggagccacaggatgaactggatttacaggacttactggatcgactggcgctggctgtggttctggagttggttgaggggttggttgtggttctggagttggtgtttcttcttccactttttccacaaaggtcttgttacccaagattgaagcagacaacttcttccctgccttattcacatcttcgatgtattggataaagacttcagtatctggattaatcgcaccgatcaattttgtatcacggaagactgagaagccatctccgccaccatacaagaagtcgttgataatcgccttgtaggtcttgttgcgatcaatttcggttccgtctgccttgtatgctttcacgaccttatatggattttcttccgttgcatcagctggtttcgtataggtgtacttgatccctgccatttgcaagaagtaaagctctttctcatcatattgttgatccaaagctttgtagatttggtccccagtgatttctactacttggaggatatttccaaatggttgcactgcttgagctgcaccccaagtgactgttccgtctggtttcaccacgaggtctgcacgaattcctccattattggtgaaggcaaagtcaacatctggataacctgattttttggcaatatctagttgcgctgctgtgaccaaatctccaacagcactttctttttgcgcattcaattcacgggtaatattttcagctttgtctgctgtaccgatttttgcttctgttacttttttaaccgtcgcattggcatcatcgatgatcgcttgaaccttggcatcttttgctttgcctttcgatggatctaccgcaataatcttagcagttggagctttgacaaagtcagctgtatccgtatctaggaccccacggacatccgagtaagctttcccttgagacgtaccttgaacaatcaaggtatttccaaccatcccgtttgtatattggtggttatgacctgcaaagacgatatccactgagttttcaggatagatttggtttaattttttgatcatgtctgcagcaggaccttctgctaccccatttttacttgttgcagcaacgtgggccaagacagcgatagcatgaacgccttggtcattcagttcacgcgcatatttggcaatggattctgcttcatccaaaacacggtattgttcatgatttttacgcaaaacaagatttgggaattctgtcgtaacaaccccgataaatccgaccttaacggtcttgtcattgactgggatttctttgatggtataaggtttccagtcaaatgggattttgttagtatctttgtcaaccaagttggcaattacaacttcttgtttagaagcttcatgaggatactcatcgacgatcttattgaattgaccaggtgttggggcttctcccttcatgatccggttgaattcaccaagtccttcgtcaaactcgtgatttccaagagtgccatattcaaagttcatttcattgaagacttttacagttggttcatcttgaaggagggcagagttggctggactagcgccgaccatatctcccgcttgcacacggatgctggcatttggcgttccggcattctccgtttcaaagtctttttgcgaatcgttcaaataggttgccaaaagtggggctgttcctgcatttttcacagtttcgccttctaaacgagctgtccctgtttgttccaaggcaccgtggaagtcattgacgcccatgaactgcacaggcaattcgtctgcaaaaacgctattgatcgcaaaaacactaagacctgcagcgaccgctaggatactgcttttcaagataatttttttcttcatagaatactccattttctaatgtagaacacttctccaaaaaggagaacgcagaacagttgaattgctgcaatcagctcttccattttactattttttcggttttacttcaatattttcctggaaactcttgcaattttatttgaaaacgcttgatttccgaacatctattctcatcctcttacttttgttacttgctgttcatcacaaaagaggctgggacaaaagtcctagcctctcaattatttttggattgtcgagcaagacgcagtggttgagtgggctctactacgctgatttcatcagcttttacagccctactcaactgtgcggaggtgggacgacgaaatcgaattctaacgaattaccgatttctgtcccactctcttttcttatttattcacgttttcccatttccagttttgaacttctggaatgtcgtctccgttttcacggatgtagtcatggtggaaggcgattgtttcatccatcttcgctgcaaatgcgcttgctgcatctccaagagctgcattagctgcatcttgtgccaagtggaagcgatccaactcagacatcacacgcatatcaaatggtgtggtgatatctccgttttcacggtaaccatgtacacgaaggttatggttgtgacggttgaagaagatatcacggatcatgccttcataaccatggaaggcaaagatgactggtttatcagttgtgaagactttgtcgaactcttcatctgaaagtccacgcgcatcaacggatgggtgacgcaatttcaagatgtcgataacgttgacaaagcggatcttcaattctgggaaggctttgtgcaagattgtgatggctgcaagagcttctaagtttggctctgtacctgcagctgcaataacaagatctggttcttcatctgctgaaacagttgaagcccaatcgatcaccttgtatccttcacgaaccaattcttctgcttcagctgctgagtagaattgaggacgtgggtgtttagaagaaacgatcaagttgatcacatcttctcccttgaaggcttcatccatcactgcaagcaagctattggtatctgctggcaagtactcgcggatatattcaggagttttctcagccaagtgagtcaagatacctggatcttggtgagtgtaaccattgtggtcttgttggaagaccgttgaagttgcaatcaagttcaaggctgggtagtttttacgccatgttgtatgtgtcttagacttacgcaaccatttgaagtgttgagtgatcatagaatccacaacacgaaggaaggattcgtaagaggcgaagaatccatgacgacctgtcaagacatatccttcaagcattccttctgcttggtgctctgacaattgagagtcaatgacacgaccagcagggctcaaggcttcatcgtagtctggtttcatacgtcctaaccattgacggcttgtacgagtgaagacttcttgaagacggtttgatttggtttcgtctggaccaaagatacggaagttatctgggttcgcatctaccaagtctgccgcatacttaccaaattcgatcatgtcttgagccatgatttcacctggtgtattgaattgaagggcatgtttcttccaatcagctgtgttcattggtttgatcacaccagcatttgtgattgggttcatagccatgcgacggtcaccttttggtgcaatttcagcaatttccggaactaatttaccagtttcgtcgaacaattcagctggacggtaagattccaaccatgaaagaagggcatcgacatgctccatgtggtgagcatctactgggattggaacttggtgcgcacggaatccaccctcgattggtgttccttcccatgcttttggaccagtccaacctttaggaatacgagcaatcaagacagggtaaactggttgagttgcttcttcagcagaacctttacgagcttctgcttggactttcttgatttcttcaattgcttcatccaatttttcagcgaacaaagcgtgtgcagcttcgtggtcttctgaaattgcagtgacattcgcaaagattggtttccaaccaagaccttcaaagaagagggccaattcttcgtctgttttgcgttcgaagatggttgggttgtggatcttccctccgttgaggtagaagattggaaggatagccccatcattgactgggttcaagaaggtatttgacaaccatcctgccatcaatggacctgtttcaccttcaccatcaccgataactgtggcagcaatcacatctggattatccaatacagcacctgcagcgtgagaaagggcataaccaagttctccaccttcgtggatagatcctggtgtttcaggcgccgcgtgagaagcgattcctcctgggaatgagaagatcttacacaagtgtttgaaaccttcttcattttgagggatgtttggattcaattcagtataagaaccatctaagtatgagtttgataccattacttgtccaccgtgacctggtccttcaatgtagaacatatccaagtcgtatttgttgatggcacggttcaagtgagcatagataaagttttgccctggtacagttccccagtgtccgattgggtgagctttcaagtcattttcaacgacttcgcgcttcaacaatgggttatctttcaagtacatttgagcagctgaaatgtagttggctgcacgccaccaagcgtctactttatccaagtaagctttgctgttataatcgacagtcatcttgtctcctcacaatttctagacaggtctgttggacaacctgtacgtttgatgaataatttaaacaatctgttttccagtcaaacagatgatattgaagaaaatattcaatattacttctattctatcaagaatttccctttttgtacattagaaagtaagaaaaatattctttgaacatcaaattttaattttctactaaagtggtcctattccctacagggataggttttaaaaaaagactttgctgatttttgcaaacgagcaaagtcccaaatgaaatggagtcggttaaatgactttttgacctttcttgtagacatctgtcacgagatttgtcgcaaagaaatagaagagataatctagatttggtgcatcaaagatggtaatgtcagcctgtttgccaacatcgaaagagccgattgttttagcacgatcaactgaataggctgcattgatggtcaccgcattgagaatttctactggagttaggcgcatcatgaagcaacccagatgcatggcaaactggagattggctgttggacaagaccctgggttgctgtccgttgttagggtgatagccatcccagcgtccaacatcttacgagccggtgcataggtatcttccatgaggctgaaggttgtagcaggcaacagattgccgataactttggcttttgctagtttttgaatcccttcatccgtaatcaccatcaagtgttctgcactagtagattccaattcagccgccacgtcaacaccaccaatggattcgatttcatcggcatgaatccgcagtttgaagcccatctccttagctttagaaagaagatagcgggattcatctgctgtaaagacacctttttcacagaaaatatcacagaactcagctagcttttcttccttcactttgggaagcatttgctccacaatgagatctaaatattcttgggaacggcccttgtattctatgggaatcgcatgggctgccataaaggtcgaaaccagatcaatttcatggtcacggtccaaggcagccacaacatccaactggcgtttttccgtttcccaatccaaaccataaccactcttggcttcaacagttgtcaccccatggcgcaacatgtagtccaacagtcgtttggacttgtcatagagggtgtcaaaagaagcttcccgtgtcgcccgaacggtgcttagaatccctccgccttgggcgaggatgtctaagtaagaaacacctgctaattttttagcaaattcatgctcccgactgcctccatagactaagtgggtgtggcaatcaatcaggccaggggtcgcaacttttccttcacaggatttcacttccgtatggtcatcgatcagttctggggctggttgccctgtcccaactgcaagaatctttccatctttaatggcgatataagcatctgaaagaatttttgcctctgccatctccttaccatagagaggatgacccagatcatttggacaaaacaattggttaaagtgggttaataggatatcagctgacatatgaaacattcctttctatttccatcgttattcattttacaattctacagaaaaagcgtcaaaaaaaagtcaaaaagttttcccctcatttttttttgctttattaaaaattatatttttttttgactctttattgacgtttcttggatacaataaagaaaatacaaattcacagtccaactataaggagggttctgctatgtcatttatagacgagaaagaaattgcagctgctatgtctgtcaaacttgactttgatgtcctacctgaaaaggcgacttttcaagaaggcattcgtcgtgcaccggatagaggcttccgcttaacgcaggctcagaccgaaattgcccttaaaaatgctttgcgttacattcctaaaaaattccaccaagagttgatcccagaattcctagaagaactgaaaactcgcggtcggatctatggctatcgcttccgtccaaaagatcgcatctatggaaaaccaattgatgagtacaaaggaaaatgcactgctgctaaagctatgcaggtcatgatcgacaacaacttgagctttgagattgccctttatccttatgaattggttacttatggagaaacaggatctgtctgtgccaactggatgcaatacaacttgatcaagaaatacttggaagtgatgacagaagaccaaaccttggtcgttgaatctggtcaccctcttggtctctttaaatcgaaaccagaagctcctcgcgtcgtcattactaacggtctcttgattggtgagtatgacaatatgcacgactgggaaatcgctgaagaaatgggcgttaccaactacggtcaaatgacggctggtggctggatgtacatcggacctcaagggatcgttcacggtacctttaacacccttcttaatgctggacgtcttaaactcggtgtgcctgatgatggcgacttaactggtaaactctttatttcatctggtctcggtgggatgagcggcgctcaagggaaagcagctgaaattgcaaaagcggttgccattgtcgctgaagtcgaccgctctcggatcgaaacgcgccactctcaaggttggattagccaagtgaccgacagtgcggaagaagctgtgaaattagctcaagcagcactggaagctggtgaatcaacttcgattgcctaccatggtaatatcgtagacttgctcgaatatgtcaatgaacaccaagtgcacgttcatctcttgtctgaccaaacctcttgccacaacgtctatgatggtggctattgcccagttggtatcagctttgaagaacggacacgtttgttggcagaagacaaagaaaccttccatcgtttggtcgatgaaaccttggctcgtcacttcgcagtcatcaaagacttaacggctaaaggtacttacttcttcgactacggtaatgccttcatgaaatctgtttacgactcaggcatcaaggaaatttctaagaatggtttggatgacaaagacggcttcatttggccatcttatgtagaagatatcatgggacctatgctctttgactatggttacggtccattccgttgggtctgcctcagcggtaaacatgaagacttgattgcaactgaccatgcagcgatggaagcgattgatccaactcgtcgctaccaagaccgtgataactacaactggattcgcgatgctgaaaagaaccaattagtagttggtactcaagctcgtatcctctatcaagattgtatgggccgtgtcaacattgctttgaaatttaacgaactcattcgccaaggcaagatcggacctgtcatgattggacgtgaccaccacgacgtatctggtacagatgctccattccgtgaaacatccaacatcaaagatggatcaaacgttacttgcgatatggcagttcaatgttacgctggtaacgctgctcgcggtatgagccttgttgctctccacaatggtggtggtactggtatcggtaaagccatcaacggaggatttggtctcgttctagacggtagccaccggatcgatgaaattatcaagtctgctatttcatgggataccatgggaggggttgctcgtcggaactgggcacggaacgatcatgctattgaaacagcgatcgaatacaaccgtctccatgcaggtacagaccacatcaccattccttatcttgcagatgaagatttggtcaaagatgcggttcaaaaattgttttaattataaaaaataaaaatggagaaagggaggaaaattcaaagactcctcctcccccaacttctcctataaaaagaggtaatcatatggcaaaaattgttgagtgtattccaaacttttctgaaggacgcaatcaggctgtgatcgacggattagcagctacagcaaaaagtattccaggtgttacgttactagactactcgtctgatgccagccacaaccgtagcgtctttacactcgttggggatgaagaaagcattcaagaagtggctttccaattggtgaaatacgcttctgaaaacatcgatatgaccaagcacgaaggcgaacaccctcgtatgggagcaacagacgtttgtccattcgttccggttaaagatatcactacagctgaatgcgttgagattgctaacaaagtagccgaacgcatcaatcgtgaattaggtattccaatcttcctttatgaagatgctgcaactcgcccagaacggaagaacttggcgaaagtgcgtaaaggacaatttgaaggaatgccagaaaaattgttggaagaagactggaagccagactacggtgaacgcaagattcacccaactgcaggggttacagctgtcggtgtccggatgccactcgttgctttcaatatcaaccttgatacagacgatctagagattgccaataagatttctaaaatcattcgtggatcaagcggtggatacaaatactgtaaagcgatcggtgtcatgctagaagatcgcaacatcgcccaagtctccatcaatatggtcaacttggaacaattcccattgtatcgtgttgtggaaaccgttcgtttcgaagcgcaacgctatggtgttcgcatcatcggaacagaactcattggactggctcctgctaaggctttgatcgactctgctgaatactacttacaattagaagactttgactacagcaaacaagtcttggaaaatcacttgttgggttagaaagggagttctatgaaactagttgacttaagtattacggagtttgccaaagttcttggttcagatgctccagctccaggtggtggttctgctgctgctctatctgctgcgaatgggatttcccttacaaaaatggtctgtgaactgaccattggaaagaaaaaatacgcagaatttgaagaccacatcaaaggggttcatgaaaaaagcgctcaactccaagaccaattactagaagccatcgataaagatacagaagctttcaacgtcgtatcagctgtctttgatcttccaaaagaaacggaagaagagaaagccgctcgtcgtgaagccatgcaaaaagctttgaaacacgcgacagtatctcctttctctatgatggagctcatcgttgaggctcttgaaaccaccaaagaagctgttggcaagtccaacaccaatgcggctagtgacctaggggtagctgctctgaatcttaaagctggccttcaaggtgcttggctcaatgtcttgatcaacatttcaggaatcaaggaccaagacttcgtccaagaataccatagcaagggactcgaactcctccaaaccggttctgatcttgcagataacatttaccaaaccattttagaaagtctatcttaaacctagcaaataaaaataaagaaagaagggattctatggttttatcggatattgaaatcgccaattctgtccaaatgaagcccatcaccgatatcgctgctgaacttggattgaccgaagacgatatttcgctctacggaaaatacaaggcaaaaattgatagcaaccaactggaacaactcaaggataaggaagatggaaagctaatcctcgtgacagccatctcaccaacacctgctggagaaggaaagacaaccacctctgttggcttggtcgatgctctttcagctattggtgaaaaagccgtcattgccctgcgcgaaccttctcttggccctgtttttgggatcaagggtggagctgccggtggcgggtacgcccaagtggttccaatggaagatatcaaccttcactttaccggagacttccatgccattgggattgccaacaacttgcttgcagccttgattgacaaccatatccatcacggcaatgagttgggcatcgattctcgtcgcatcacctggaaacgggtggtcgatatgaacgaccgtcaactccgtcatattgtcgatggtcttcaaggaaaaacaaacggggttcctcgtgaagatggctttgacatcaccgtggcttctgaaatcatggctattctctgtctctcagaaaatatccttgacctcaaagaacgcctcgatcgcatcattattgggtacaactaccaaggacaaccagtcacagctaaagacctcaaggctggaggtgctatggcagccgtcctcaaagatgccatccatccaaacttggtacaaaccttagaacatactcctgctatcatccacggcggaccttttgccaatattgctcatggctgtaacagtgtgctggctactaaactagctctcaaatatgcagactatgttgtgacagaagctggttttggagcagacttaggtgctgaaaaattcattgatatcaagtgccgcattgccggactcaaacctgctgccgtagtcctcgtcgcaaccatccgagccctcaagatgcatggtggagttgccaaagcagacttggctaccgaaaatgtccaagccgttatcgatggactaccaaacctagacaaacacttggccaacatccaagaagtctatggtctaccagtggtcgttgccattaacaaattcccactggatacagaagcagagctagaagctgtctatgaatcttgtaagaaacgccatgtagatgtggtcatttcagatgtctgggcacatggtggagctggtggtcgtgacttggctgaaaaagtcattcaactggctcaagaagaaaaccacttctcttatgtctatgacgaagaagacagcattgaaacaaaattgaccaagatcgtcacaaaagtctatggtggtaaaggcatcagcttaacaccagcggccaaacgcgaactcaaagaattggaagctcttggcttctcaaactacccaatctgtatggccaaaacccaatattccttctcagacgatgcgaagaagatgggagcaccaaaagatttcacagttaaaatcagtaaccttaaggtggctgccggagctggcttcatcgtagctctcactggtaccattatgaccatgcctggcctacctaaagttcctgccagtgaaaagattgatatcgatgcccacggcaatatcactggtctcttttaagaaagaaggcgtcctatggtgactctccttcatcttacccccgcagattatcaaatttctacctggtccggtggccaaaccacccaactctttctctccccagagggaggaagctatccagatcggacctttgacttccgcctctctactgcaacggtagaagttgaaaaaagtaactttaccgatctcacgggctaccaccgaatcttgatgcccttgaatgcctccattcgactcaaccatcaacagaaagaagtggttttgaacccctttcaaagctacttctttgatgggggagatcctgtatctagccaagggacttgtcaagactttaatttgatttacaaaccttcttatcaggggcatatgagtgctatatccccaaaagagagtgtcaaaagtcagagtcgctatcaattgatctacgctctctgtccactaacactcgaatggggaaacaatcattctcaaactctccaaactcacgagctcctggtgatcgaacaagcatctcctcttcaagagatgacaatcacgtttttaccccatcagtctggggagcaaccgattgctatctggactggactacaataatgttcacaaaggagaaacattatgaacggagcacataaacagtcgattgaggaacaagaaaaagcgaaattcagctttagcggtgccactctttacggtatcaacgccgtaatcggatctggtatcttcctccttcctcaaaaaatttattctggcctcggaccagcttctctagctgtcatgttcggggttgccattctcgtcatgctactatcagcctgtctggctgaaacagctggctacttcgacaaaaacggtggagccatgcaatactcaaaagccgctttcggagacttcgttggctttaacgttgggattctcggttgggccgttactgttatcgcttgggctgccatgttagccggatttgctaagatcttcatcatcaccttcccagcatttgaaggctacaaccttccgatcagtatcggtatgctgattctcttgagtctgatgaacatcgccggtctgaaaacctctaagatgttcactctgacagctactgttgcaaaattaatccccattgtcctcttctcgctctttgccatcttcttcattcctggcggggtaagcaagggcaacttcacacctttccttcaattggaaagtggaacaaatctcttcagttctatttctagtacagccgtctacatcttctacggtttcatcggatttgaaaccatgtctatcgttgcaggggaaatgcgtaaccctgaaaagaacgttccccgcgctattctaggttctatcagtattgtatctgttctctacatgttgatcatcgctggaacaatcgccatgcttggtggtcgcattatgcaaactggtgcaccggtacaagatgcatttgtcgaaatgattggccctatcggagctccactcgtttcttacggagccctcatttcaattgccggtctaaacattggtgaatccatcatggtccctcgtttcggtgctgccctagcagacgaaaaactcttgccagcagaacttggaaaaacaaactccaagaatgctcctgtcattgccattatcatttccggtttctttgcattcttactcttgttatctggatctttcgaatccttagcagctttcagtgttgttttccgtttcttccaatatattccgactgctttggcagtgctcaaactcagaaaaatgtacccagagaaaaaggttaccttccgagtgccattcggtccagttatcccaattttggctgttgtcatcagtatcttgatgattgcaggggataatctaatgaactttgtatggggagctatcggtctagtaatcgctagtggactttactttgttttccacggtgacaaactacataaatcgaaaacccttcctcactaattttctttacacagtagatgggttagggagcgaagctcggttttgctccctaacccatctaggactccacgaatgtcaaacctgagcccttttctctatgactcttttcaatttttatgatcaatagacaatgggaccatgtttggtattcaaaccgaagtaaacaacactacttccacagaacaactattcataatcggaggttttatatgactcaattgattcatttagatggtaatagcttaacactcgaagaagtcatcgctgtagctcggcacggtgcccaatgtgagcttgatgaacaagccaaagaagccgttatcgcatcccgtaaaatcgttgatgacattgtccgggaaaaacgagtcgtctatggtgtaaccactggctttggttccctctgtaatgtcagcatctctccagaagatactgttcaactgcaagaaaacctgattcgaactcactcatctggcttcggtgatccacttcctgaagatgccgttcgtgccatcatgctgatccgtattaactcactattgaaaggttattctggcattcgtctgtcaaccgttgaaaaactgttagaattgctcaacaaaggagtcactccttatatccctgaaaaaggctctctcggagcttctggagacttagcaccacttgctcatatggttttaccaatgttgggtcttggacgcgcctactacaaaggagaacttctcagtggtcaagaagccttagatcgtgctggaattgaaaagatccaattagctgccaaagaagggcttgccttgatcaatggtacgactgtcctaaccggtatcggtgctcttgcgacttatgatggtatccaattgctcaaactctctgatatcgctggtgctctctcaatggaagttcacaatggaattaccagtccattcgaagaagaccttcattccatccgcccacaaagtggacaattggcaactgctcgcaacatccgtaaccttcttgaaggaagcaagaataccactgttgcgactcaacaacgggtacaagatccttatacacttcgctgtatccctcaaatacatggagccagcaaggattctattgcttacgtaaaagaaaaagttgaaatcgaaatcaactctgtcacagataacccaatcattaccaaagaaggacacgtcatctcaggaggtaacttccacggtgaaccaatggcgcaaccatttgacttcttaggcattgccctttctgaaattgggaacgtatctgaacgtcgggtggaacgcttggtcaacagccaactcagtaaattaccatccttcttagtcaaacaccctggactcaactcaggcttcatgattacccagtatgcttgtgcatcccttgcatcggaaaataaaatcttggctcaccctgctagtgtcgattctattccatcttgtgaaaaccaagaagatttcgtcagcatgggaacgactgccgctcgtaaagcagcagaaattcttaaaaactcacgtcgcatcgttgctactgaaatcatggcagcttgccaagccttggatctcaagccagaaaatcatgaacttggtaaagggacaaaaccagcttatgagctgattcgtcaaaaactgaacttcattgaatttgacaaagatatcgaaatctttgaagaacttaataaagcatctgctgttgtcgaaagcgaagaattcttagcaaccatcgaaaaagcagttgacttaagcattcaatactgatacagtaagaataaagcaaaacagaggctggcgatcttctcagcctctgcctgctttcagaaaaataagggaggcgacaagcttgctcacaaactactatccaatgacctacagctactaccaaggtagcatcgaggacaatccctacacggccaaatggggaatggtcaccaaatttttagacctaaacgacgagaccctcactccatttgaggggatgacctttgggatcatcggctttaagagcgacaaaggagtctatatcaataatgggcgtgtaggagcagtcgagggtcctacagccatccgttctcaaatcgctaaacttccatggcactggggaaccaatgtgacagtgtatgatgtgggaaatattgacgggcctaaccattcactagaagaactccaagaaagtctctcacaagcgatccagcgcatgtaccaactagggatccaacccattgtcctaggaggcggtcacggaactgcttacggccactatctagggattcaatccagtttagaaaaagatgaacaactggctgtgatcaatctggatgcccactttgatttgcgaccttacgaccaaaccggtcccaactctggaacaggttttcgtcaaatggctgatcatgcgaaagaaaaaggtcaggacttcccttacctcatcctggggatccaagagcacaataataacctcttcctctttaattacgttgctaaaacaccaagcattgattttttaactggccaagatctcttccagatgagccaccaagccattctggatcgaatcgatcaatttttagaaaaccaaaccgcgatctatctgtctattgatatggattgctttgcggtcggctctgctcctggtgttagcgccatccaatcgcttggtgtcgatcctaaactagccctcctgcttctccaacacattgctgctagtggtaagctaatcggatttgatgtcgtggaagtttctcctcctcatgatattgacaaccatacttcaaaccttgctgcgacctttatcttttacttgacccaaatattggcgcaacaaaaactgaactaagaagatttctacacacataaaaagcatagaaacacccattgctagggtatttctatgctttttcttcgttttcaggcacaatgatctttgcctgaaaggagaacaggccacttagccctctcttatgatttaggcaagagccactacaggtcttttaattttttaagaaaatgacgatctctgtagggattcaagtgttgctctgccaccttcttgtagtaattcttatcttctttcaagaaggtgctcagggcaggagcgagctcttctcctttctccttttgatcagataagaaagctaatagataatgaaccatccccttatcccgtgaattagcagatggtttcatcgtcctttcttttcgagccagataagccgcaaccttttcttgatctccttgctgacaagcaattaaggattggtaaaattcgagcaattcttccttccaagggaagcgaacactggacaaaatcttctgagctctgtcaaaacagcggcgagcttggatcaaatctcccttccaataataggcgatcccaagatcaatatcaaagacgacacggacggaatcaacagcttgatctcccaccaaacgcagaacctcttctaagtgggtgacagctacttggaaatggcccctaatttgctcgatttcagcgagataggccaaagaagccgcaatttgaatggcatacttggcctgcatgctattggtcaaactaaagcaatcaatggagcgatacagatgccgggttgcctgctcctcatccccaaccatcaggtgatacaagcccttcaaacgcaactggatcgcgatgacctcatgattattagcttggatggcatcttccaaagctaaatctgtataataggccatctcagagatattttccgtttgaatgcaataataaatgatttgccgataaccctctaagaggaagtcggattgcttgagttcccgcgcataggagatgactttttggatatcatgaatccccttttgatactccccacttcgaataaaatagcgaccttctaagtacaagtaacgcagttgtaaatgcttgtattctctatctctttggtgccttgaaaagaggttatctaattcttggcgaatgcgggatagctctccaaaaatgtccaaatggctatttgtaccatctgataggaacccctcatctaccttggaataaatcggaaacagctcatgctccagctgaaggatttcttctaaataggtcaactcaaaagatatggaacgcaaaagattttgggattgcttgtattggtaggcaatttccttataaagaagaaggtccgtcgcatcttctaagctttcttccaatttttgcgcaatttgttggtggaagagtcgccgtctagctggcgagaggagatggtaaaagtacatggctaccaattgcttgcaaaattgaaccatgagagcctctccttcttctacgattgaaacgatcgctctttcagataaaggctcgattaattctgtcaaaacaggaagctctgtagctgtcaattctgccaagatagacagagaaattggcttatgaaaacaagataggtagtgtagaagagcctcttcctcactgctcatatccccaagttcctgagaaagataggcttgaatgatatcaggcaagggttctaaattttcattttctttccactcttcgatatagctggacagcaagaacggactgccttcactccattcaaccatctgctccatcactgccggctctattgctcccagttcccctttcaagagagcacgactttcacttggggcaaaattggtcaaccctagttgggacaagcgtttctctaccttcaagccccccaagaagttgacgaagaaagctggcagaggctcttcagctgtaaaaatcagttgccatttctcctggtttcttcgctcctctagttgtttcactttttctagagacactgcatcgaaccactgggcgttttcaagcaggatcaggagcggtttttctttgctaaggctctgaagctgattccataccgaaatgagatcatcctcctcttccagaagggaaatccccatctcatcccccagtttctctagcgcttgtctgagatcattccagctgcttccttcgtagcgctgactagtggctcttccttccaccttgataaaattaaaactgcgattggacatcaagaccaactgccgcaagagacgtttcttacctgttccagattgccccatcacgagaaacggtcctaccgcttcacccgtctcgactaaagagaggtattcctcgagttgcgagagttcttgtttccgaccaaaaaaggaaagttcacggatattcaagcgattggtcagtttatgagttcgtttggcttccaaaacggagtgataaagttcctcaatcgctcgactgggacgaacactgagctcgcgatccaataaatcgactagcttataataggtctcgaaaaattttcctagctggtgatggaagctataatactccatcaagagctggtagtttttctcttcaaattcatccagctctaccaaatgatggagcaagagttctatactaggatctgcaaaaccgacctgctcaattttttgatagcaactttcgacatagagcttcctatatgcatctcgtttgcgagaagcccactgatcaaagtcttcatcatccttgacatagaagccctctagaaagtctccccgatagagatccaaggcacttagtgggtctctttcaaagagtttgacatccaaagaaaggctcaaatcaggattaagggccaaactgctccgacttggagagacaatgatatctccttcaaagattttattggcttggtaaaccgtattccgtaagtttttgcgagctacttggttttccttatctccccaaaggataccggctatttcatcgcggttgacctggcccatgaccgctaaataataaagcaaggcctccatcttcgaaaaagaaaaccgaatagttttctgattgaaaacaaccttagggggtccaaataactttaacgtgagatctttcttcattgcaagcgcctccaaaaacttcatattaatactataaaaagaaagttggcttttagcaagtgatttatccaaataaaaagagattgagaacgattctttctcaatctctacacttcctactaaaagtgttgattaattcacttcaaaattcggttgatgatcaaataacgcctttgttgcttggtagacgtggtaagcgacatcttcattgttcatggtgtaaagatggacacctgccacatcttgagtaaccaaatcaacgatttgatcgactgcataagcaagtcctgctgctctgagtgactcaggatcatgctcatacttgtccagaatggctttaaacttccgtgggatatgaacattttcacaagtcttaaggagacgaagggcctgattacgattgagaatcggcatcactcctgcatgaataggaacatcgatcccagccaaggtacacttatcttgaaaatcatagaaacgctcattgtcaaagaaaagttgagtgaccaagctagagcaccctgcatctaccttctttttaagattttgaatatctgaaatttggtttggagaatctgggtgtccctcaggatagcaagcaccaatcacctcaaaatgaggagcttctgttttaataaattcaatcagatccgttgcataacgaaagtcttttaaaggttccacaccagggataatatccccacgcagagccaaaatccgatgaacccctacttcatctaactcatgaagagtatcggccactttttccttgctcaaataaacggctggtaagtgagcaattgtcggaatagacaattcattttgaatataattggctaaagcaaccgtcgtctctttgatattgtatttattattgctagcggtcacactaatgaagtgaggggctagctcctgcatatttgccaaggcacgtaagagcttggcattgcctacttcaggatttggaggaaaaacttcaaatgacagagacggtgtgtgttgtgacatattctatccttttcttttgtttctttgatcaagaactctgagccactatttctaggataagggaacgattcgaaaaccctctacacgatgatagaaggtcctcgaaacatttcttacaagtgttcacgcgcttctttagcggcattaaccagcttgatcaagctttcttttgtttctttaattccgcgagtcttcaaaccacagtcagggttgatccaaactttgccacttggtactttggccaagatcgcttcgatagtgtgatcaatttcaccgtcttgtgggacacgtggtgagtggatatcgtaaaccccaggtccaacttctgtttggaagtttttcgctttgagttcgtccaagatttcaaggtttgaacggctagcctcaaatgagataacgtctgcatccaagttatcgatcgctgggatgatatctgtaaattctgagtaacacatgtgagtgtggatttgggtatctggcgctacagttgagtgtaccaaacggaaggctggaatcgcccagtcaaggtaatcttcgtaccagtcgctacgacgaagtggcaatttttcacgaagagcagcttcgtcgatttggatgattttcacgcctgcagcttcaaggtcaagaacttcatccttgatagcaagagcgatttgaagagtagaatccttgatagagatgtcttcacgtgggaatgaccagttaagaatggtaacaggtccagtcaacatacctttaacaggtttgtctgtacggctttgtgcgtagctagaccatttcacagtgattgggttgagacgagtcacatctccccagatgattggtggtttcaccccacgcataccgtatgattgtacccaaccgtttttagagaagaggtaaccagacaagttttgaccgaagtactcaaccatgtcgttccgctcgaattcaccgtgtacaagtacgtcaaatccaacttcttcttgccatttgatccattcgtcgatcgtttcagcaaggaaggcatcgtattcttcttgtgtcaattcacccttacggaaggccaaacgtttggcacgtacttccttggtttgagggaatgaaccgatggtagttgttggaagtgctggaagcttgaaggcttctttttggatttcttcacgttctgcgaaagctggcaaacgagtatagtctgcttctgtcaaagctgcgatgcgagcatgaagttcagcatttgctccaacgcgttctgttgcaaagaggtctttgttggcagcaagagcttctgccccttgaccattgcggatggcatccaagtcacgcaattcacccaatttttcaaccgcaaaggcgaagtggttcaaaatagctggttcaaaatcttcattagcagttgtaaatggcacatgaagaagagagcaagaagtcgtcaagactaccttttcagctggaacttgatccaagatttccaagctcttttcatagttgtttcgccagatgttcttcccattgacaatacctgcataaagagtcttatcagctgggaagccacctttcaccaattcaagtgttttcttgccttcaacaaagtcaagaccaataccatcaactggcaagttcacaaggtcattgtagacatcacgaacatcaccaaagtaagtttggatcaagacttcaaggcctttcttgtcagccaagagtttgttgtagaggttcaagaagagagctttttcttcagctgacaaatctttgacaagagctggctcatcgagttgaatacgagtcgcaccaagctcagccaatttggcaaagacttcttgataagcagcaaccaagctgtcgacgaagtcctcagctttcacaccatcttcaaagtcagataattgaaggaaagtgaatggtccaacgactactggacgagtgttgatccccaattctttggcttcttggtactcatcaaaaatcttgtgaccagccaatttcacttctgttgttttttcaaatttaggaacgatgtaatggtagttggtgttgaaccattttttcattggaagggcacgcacatcccctttttcaccttggtaaccacgcgccaaagcgaagtattgttcaaggtctgtcaaatccaagttttgaacagatgcaggcacgacgttgaaaaggaaggctgcatcaaggaaattgtcgtagtgtgagaagtcatttgaaggaatctctgagatgccttgttcttttacaatgttccagtgttttgcacgcaagtctttagcagctgccaagagctcgtctgctgagatttcttttctaaagtatttttcagttgtaaattttaattcacggaattcacccaaacgtgggaaaccgataattgtagttgacatgttgtgtcctccaaaaattctaattgacactatcatatcagaagatagccgtcttgtataattgcttttacacgaattttgatatagccataaactataacacagatttaatgggccttgagaccagagctcaaaagtaaaaactaggacttcttataaatatttcctataacccaagcgtccccgaactatttttgagtggattctgctcgaagaatagcccctaaaaagtaaagtaggccttctctactgagaaagacctgtgcaagcataaacaaactgcttctgtttacaaatctaagaaattctataaaaatgtattcgttagaatgattctatcatctactgaaactttccgccgtgagaaaagtgctagaaacacttttgtttctagcactcggaattattgagacctaaggctcaataattagtcttggaacttcgtagaagttcgctgacgtccgtaactcacctaaggaaagttttttagatgacgtcgttcccaatctgacaggccttctctatcgagaaagacctgcttcaacgaggaagtaatttcctctatttttccatttgctttattaggctaatttgacacagaaggcatcccaaggggccaacttacctgattcgaggacttgctcgaccttggtattggcaatgagaacctcttcaaccccattgacgagcggtaactcttgctcttgactggagagattgacaaccaccaaatagccttgctctccttctacccgcttgtaggcaaaaaccttgtctgctgcgtccaccaattcataatcagcggtcacaagccaagggtgttcttttctcaaagcaatgagggcttggtatgtatagaaaatagagtctggatctgctagggtagcctcaacattgatctctttgtagtttgggttgaccgcaagccatggacgacctgtcgtaaagccggcttctgcttcatcattccactgcatcggcgtccgggcattgtcccgaccaatatggcggatttggtccatgatcacttcgagcggaacccctttttctaaggcttcatgagcatagttgatcgactcgatatcttctacatcctcaaggctcttaaatggataattggtcatcccgatttcttccccttgatagatataaggagttcccttcatcaagtgaagcagaatcgctaaagccttggcagatttgacacgatagttcccatcatccccccaagttgacacaatccgtggcaaatcgtggttgttccaaaagagggaattccagccttcctcttctcctaattccgtctgccacttggtgaaaatttccttcaatttaggcacatccaattccttcgcatagtgccactttggttgacccggttggtattgaaggccgatgtgttcaaattggaaaaccatggacaattcttgattttttggattggagtattgcttggcaatctctggagttgctccccaagtttctcccactgtgagcagatccttatcgccaaaggtcgcttgattcatttccttcaagtaaggatggagcatgggaccattgctgatgatttcctgatctgggatcttaccgatcatatcgatcacatccatacgaaagccaccaattcccttgtcaatccagaaattcatcatgtcatagatctgatgacggagctcctcattttcccagttaaggtctggttgcttcttactaaagttatgcaggtagtattgacctgaagcttcatcaaattcccaagcagagccactaaaagcagaaataatgccattgggctcatcgcgccagatatagaaatcccgctttggactgtctgggttttcacgcgcctcgataaaccaagcatgctcatcagaggtatggttgaccaccaagtccatgatgattttgatcttgcgtttctgaccttctgcgatcaattcttccatatcttccatggtaccaaagatggaggcaatatcctcgtaatccgagatgtcatagccgttatcatccatgggactcttgtagactggtgagagccagatggctgtgatccctagcttttccagatagtctagcttgctcgtgatccccttgagatccccgatgccatcgccattactatccttgaaactttttggataaacttggtaaattacggcgttatgccaccatttttgttccattttttcttctcctttatgattgtgaaatcattttcatcatacaaaaataggggtgaaattgcaagagtttacaagtcttctccctcttcactggaataaatcacttcaaagagacgttggcgcaagccttcctccaaaggtgtgatgaccttcatcaactgtttccaatccttcgctcttgaacaagccgcaaataattcgtttttcctatcgtaggccaggttggcagattttaagagctcaaacatccgatcttctttggcaataggatgcgattgcagctcacccatcgcaatttcttgactttgattatccactaaaataggagctgtctcaaaggtatggaggaagaaacggtgctgtctcttttcaggaagcagcgttcgatcacctgttaaatccagcttaatctttctttcatcccaattgacagttaggcgggtttcaaccttgttatctccttctccttcaacgagtacgaaggaacgattgtcacctgggaaaagatgccagtccagcatttctggaaggtctacccctgtctgtggttgtgcatccatagggatgatggctcctgcacgtgcaaagaccggaatatcctggctggtcctaaagaccgtaagcttgcctcttccttcatacttccaatcatggaagaaatcgtaccaaacgccgtctgggaaccaaacgctcacagaagcactatgaaagacaggatccagcgcttcggtaattggtgccaccatgagttcactaccaaagaaatattgattcttcgcttcataagcctcttcttcatttggatagtggtaatagaggggttgaaccaaaggcagcccttcttcgtgcgtcgccacattcatagtgtagagataaggcagtaagctatggcgcaggcgcaaatactgtttcatcaagtgacaggtctcaggcgagtaaaaccacggttccttgctgttaaaggcattacaagaactatggagacgattgatcgggctaaagaccccaaattgcaaccagcgaagagccaagtcttcatcatagtaaccccgcatatggccaccaatatcgtgactccaccacgtataaccgatatttgaagctgtgctggtaaaatagggttgaaaggctagggattcccaagtcacaatggtatcccctgaaaaaccgatcggataccggtggctgccaggacccccataacgcgataagatgagaccagcttggccttttcggcaattgtctagataatgatagtgatttaacaaccaaaggggatccatcttgccatgacttccctgttgccaatcaatccaccaaaagtcgactccttgattttccaagggatggtggacatcttcgaaataagcttcgcgaaaggctggactgtaaaagtcaaagcttgccgcttcttctttttccgcatctaatcccaagcgttttgcgaccatagggtaagcatcttcgaaggcgcgaatgccatctgctggatggacatttaaggtcacctttaaaccacgctcatgaagaccatgtaagaaggcagctggatcaggaatcaagtcccggttccaactatagcccgtccaaccacttccaaagcgagcaggaattgctgtcttgtgccagtccatatcgatcacactgaccgcaagaggcaccccttctgctttgaatcgatccatcaaatctgtgtactcctgactggtataaggccaatagcgactccaccagttccccagagcataacgtggcaagaggggtggctgtcctgtcagatggtaaaaatctttcaaggcacctagataatcgcgcccataaccgaagaaatacagatccacttctggatagggccgtgctctaaaaccactttcgtcatcatacaagtaggaagcggaatcgtctaaaagagcataaccggccttgctcaagatcccatcttgcaactccatagccccatcgacctcgtcaagtgtccgactggtcccctttaaggtctccggctgatctccatagtgccaccggctcccatagaccgcatactgacccttgagctcgatataaagtcgatccggtgcaaaaggtcctttttcaaaatggaggtggagatgctctgtatgaaggtcgagaacagcttctgtctccacaacctcacaggcaacaggtccaaaatctcgattttgtacaacttgcgtctgaccatcttcaaaaacaccatcctctgagtattccaagcgcaccaaggattccgttaatacggagattcgatagttttctccctctatgactggtcctgccatttgtctgtcctcctctttttatagggcatctgactcgccctcttttcatctgcttcgcctcactaggtaaacgcttacgtttttactatagcactcaaaaaaaggcctgtcaacacttgacagagcctttcctaaaattttataagatcaacttcccaatggatcaagagatacatgagactcgagccaaacatatctgccaaggcatgcatgaggaaaaatggcaagagattcttgacgaccttgaggacggacgttaggtgaaattatccggtggatgatttcagcaatccaggaagttctatgactaaattaagatacagagggcgtctgcggagtaaaaattaaaaatcatttttctgcagaatcatttcacctattttagttaaaaaataggttatcaacattctgaggctgggacaaaagtcctagcctctcaattgtctttggattgttgagcaagacgcagtggttgagtgggctctactacgctgatttcatcagcttttacagccctactcaactgtgtggaggtgggacgacgaaatcgaattctaatgaattaccgatttctgtcccactctcaattacacgattagtctaacaagtcttggattctatccagatactggttgtctgtcaccgccatcacgcgcaccccttctggccagataaagtcgggagcaatctgaatatgaagcggttgatcttccgcatctcgataaccaataatgttgagatggtactcctctctgacagctaagtcctgaaggctttttcctacccagctggatggaaccgtaaactcgactactaccacttcttcatccaactggaaaacttcaatccggtgttggaaaagaaccattttggcgagggacatgcctgcttctacctctggcaggatgaccaaatcagccccaatcttttccagaatttctttggtcacttcatttttgaccttggcaatgacatgctcgactccaagcgccttacagtgcatgacagccagcacactggactccaggttttcacccgtcgcgatcacgactgtgtcacagttcccaatatctgctgcatccaagaggtccaactccgtaatgtctccaacaattccagttgtaatcatggattcatactgattaatcacatcttcgtgatcatcaattgcaacaatatccacatcctggtcctgcagagttttcaggacactctgtccaaaaattcctaatcctaaaattccaatggttcgattcgccataagtctctcctatccgataatgatgtctgctttagcatattgcaatgcatctgcctttttagctttgtaattgttcaaactgaccataagggtcaaggggccgatccgaccgataaacatgagcaccatgatgatccccaaacctgctccatttaaggtcgaggtcacattggctgtcacgcctactgtcgctagagccgatactgcctcaaagaccaggtacaaaaagcgttgaccatccggagtcacgagacaaagaccaaagagtccaaggagaaaagtcaactggaaaatcactgccgtccccaaagagcgttggaccaagtctggtgcgatggtgcgctttcccaggttggtatgtggcaagccgagcaactctttgcgcgctaagagaatcaacaccaagaaggtggtgatcttcatcccccctgctgtcccacctggtgctcctcctaggaacatctgtaagagatagataaagagcgttactggccggactgctgtataatctagcgaagcaaaaccagctgtccgcatactgacagtttggaagaagctgaccaagatcttctctcctaatggaagggacccaatcgttgctggattattaaactcggtcaaaagactagtcactgtcccaaagagaaggatcgccgctgttaaccagagaaccaccttggtatggaagcgaagagttcgccgtcccgattgattacgggccttggtggctaggtcaaaccagaccatgaagcccaagcccccagtaataataagggcagacaaggtcagattgaccaaccaatcggtctggaagctcatcatactatcacctccaaaattatcaaagcccgcattacaaaaggccgagaccgcaacaaagatggagttaaagatcccatgcccccagccaaagcgagggataaagcgggtcatgaggagcaaggcccccactccttcgatggtaaaggtggtaataaagatggagcggacaaaacgggccaagctctggttattgctaaaactaaaactgtctcgaatggtctgccggtccttgtaactaagtttttggcgaccttccataaagaagagaccgataaaggtcaagatccctaagcctccgatctggatcaagagcatacagatcaattgtcccaaaccattataggtcgaagccaccgactgggtaaagagccccgtcacacagaccatggagaccgctgtaaagaggtggtcgatatagcctgcttttgagctcgcttgctggacaaaaggcagactcaataagagcgagcccaccaggataactaaggcaaagctgagaaatattcgccttgccggagacaggcttttaattttggcctgccattgtttaaaaaataatttgactaacatagcttcattgtatcataaaaagtgaaaagacctacaagtgatgaaccatctctaggcacaattctagggccttctcaaaagcttcagcaccccagtcacgctggtcataattttccaggtctgcaagagaatctgcggtaaataggagcaagccccaaactgcatcacgaagctgggcgaccgctgcaagtgaggcacactccatctccacaacacgacacccttcttcaatgcgataggccaccttgtcaggtgtttctctataaaaaccgtccgtcgaccaggtcatgacctcttgataaggaatatcttttcctttcaagaccgtttcaatagcggtcagtgcacgactgtccacttcgatataacgagaaggcgctacataatggtaactagctccctcatctcgcaaggccttggtcgggatcaaaaaggcattttcttctatatctaccaagacgccacagctacccgaggaaatgatcttcttcaccccatagccaatcaaccaatccatgaattgggcagcagctgcagatccaactggcgcttgggccaagcagactttctctccttggtgctccataacatagaccggatagaccttggtagctgagacaaagctagctacttgtttggctccaacagctttggcaaagcgatcaatctcatcctccaggaaagcataaacacatttttcgggtaggtgcaggtctaacccctcatgggtcggcataatgactgcctgcggattgtcgtcaaactctaaaatgggtatttcatgtttatggatcattgtttctcctttttgacgagtatttctttaatgacacgggctgggtttcctgcaaggaccacattgtctccaaaggacttggtcacgactgctcctgcgccagcaaccacattgtcacccagcgtcacaccaggaaggatggtgacccctcctcctgcccagaaattgtcccctattgtaatcggagcgccatactccagaccagaattgcgctcgtctggatccagtgggtgtaagggggtcaaaaattggcaattaggaccaatcatggcattctttccaatcgtgataggacaaatgtccaacatggtcaaattgtaattggcatagaaattttctcccagatggatgttgaccccataatccacaagaacctgacgattgagatagaggttttcaccggttgaaccaaaccactctttgatgatagctacaccttttttaggatccacctcttggttaaaagcttcctgtttctcccgagaggcttttgccaaagcccgtaattcagggtccgcaggtctataatagtcacccgcaatcattttttcatattcactggccataaggaaacctccacgttattttgacatattatagcagaattccacctttaaaacaaacgtcagaataagggtttgcaagaaaaaagatcataaacacttaaaaatacttaacaaaacttgcatttgcttacaaaataatgtacaataaagacaagaacagaaataaggagcgaattcatgtaccaggaacaacggctcgaaaaaatcctagaacttttagaagagcgaaaacagctatccgctaaagaaatggttgattattttaaggtctcaaaagataccatccgtcgagacttcgctctccttagccaacgccagctggtccgcaggacccacggtgggctccttcccttaaacaaagaacctggcccttcttatctagaccgcagtcaaaaggctaataaggaaaagactgccatggctcaaaaggctctgcaattgatccaagatggacaagtgatttttctcgacgtttccacctcgatgaccctgcttgctggcatgctgaataaggaagtcacagtctattcgcattcccttgacaatgccatccagctcagtagccattcccaggttgactttcatcttttaggaggaaaattctaccctaaaaaccgcttctactatgacgcgaatcaagcacaaatactggacaatcttcgctttgatctcgctttttttggagcgagtagcttagccaacggcgaggtcacctttgaagatgcagaagacgttgccgtcaaatccctcgtctttgaacgggctcgtaccaaggtgctggtggcagaaagcagcaagttctcccaaaatgccaactactatcttgctcgtctcaagcaatttgattattggattaccgaccaaaaaccaagcccggaaatccttaaacaagtcggcaacgaaaccactattctctattaggaggtaatctttatgtctcacattcgtctcatcatcagcgatatcgatggcaccatcttaaatgaccaccatcagatcgatccacagttagcatcattgatcccagatttaaagcgtgaagagatccctttcgtgctagcctctgctcgctcccccaaaggaatggcacccattgccaaagaactcggtatagaagactgccccatggcctgctacaacggggccttgattcaaaaaggcgagcaggttctgtttgagcatcccttagacaagaatgaagctcgtcagtttatcgactgggccaaccaacacttccctcaagtttcgatcaacctctatagcggaaaagactggatgaccgatcatctcgaccaatggagccgagaggaagcccggattacaggggaaaaacctcttattcttcccctattggatcctttgctggatatgacaaagcccctccacaaattgctcttaattggagatgcagaagagatccaagccctctatcgtgctatttctgccgatgacttcccttctaccgccttttatctctccaaagccaactacctagaagttactgctaagcacgtctctaaagaggatgctctggttgaactcgccaaccactaccacttgagcttagaagaagtcctcaccatgggggacaacttcaatgaccttcctatgctcaaaaaagcaggcatcggtgtcgctatgggcaacgctcctcaagaggtgaaagacgaagcagcagtcgtgacaaaggacaataatgaaaacggggctgggcaagcggttgaaacctatgtgttgatctagtcatccgtttaaaaaggacgtcgagtataatacccgacgtcctttttgacgaatgtatagcactaaaactacatcattttcatataaatgctatcccaacaatgtctgcagaattggaaccacaatcacaaataagactgtgctgagagtgaccacattcgttgaaaactcaacatcgcctttaccttgattggcaaggataggaagaactgccaaggctggtgttgctgattgaatcataaaggttctaaattctggtgccaccatatttggagagaagaacttcagaaccaagagcatgatgaccggtgcaagaataaaacgaccaaccagtgtgataatggtatctttatcaaagcgaatcgtcttaagtcctgccttagctaggacgataccgatatagacaagagataagggcgttgttaaactaccaatataagtcaaggtactttccgcaaaacttggaacaggaatacgcaacaccaaaaagacgagggctacgagaaaacctaataaaggagctgggaaaagcttcttccaattaaatgtttgagcctgttttgaagccccttctttactatcagaagtcatcagatagacacctaatgtccaagtagatactgtatttgtaatataataaaccaagaagtaaggaagggcttgatttccaaacaaagcgatatttaaaggcaaaccaataaatatggtattggcattaacaaaggtattaatcatagtccctcgacgacctgggcgcactttaaaaactttcactgcgataaaggccgctaggtaaccaagaatgaaggcgataaacgtgtacaacaaaccgccagacaagctaatcagcttatctaaagttaaatatttaagaacagaggtgaaaattgcaacaggcatggccacgttcataatgagcttagacaagtcatttccgaaactctcttggaaccaaccgcggacttgcaagaaataaccaagaatgatgatgacgataatgggtacaatactctgaattgacgttaaaaagatttccatagtctccctttctatctaacaagacatacacaaaaggtgtacgaggcatcccgtcgcactcgtacaccccattcccatttacttatttatattctgggtaccatttcaaatcacggaccgctttagccatatctgtttcttgagcacgcgcaagaccttgttcttgcgcttttttagcaactgcttctgctactttgatagacacatcagctacatacttgaatggaggtaagactggtgctcctggttcgcctggattgacaataccactcaatgaatgtgcggcagctccaatcatttcatccgtcaacagactcgcttcagaagccagcataccaagtccaagacctggataaatcagtgcgttattcgcttgaccaatcacgtagtccacacctttataggaaactgtaccagctggaattcctgttgcaacaaatgcttttccgtctgaccattcgatcaaatctttggcacttgcttcagctagtttggttgggtttgacaatgggaaaatgataggatgttcagtgttttcacacatagcttctacaatttcttttgtgaaagtatttggctgagttgaagttcccacaagaatggttggtttaaccgtcttcactacttcaagaaggtccgtcaactgatctgcattggcaaaatcagaacgtttcttagcaaatggtttttgttgcggcgttaagtcatccatatcatcaaaaaggagaccttgtttgtcgaccataaagaagcgtttataagcttcttcttcaggcagaccttcactaaccatttcacgaaggacacgagaagcaatccctgcaccagcagtcccaccaccatagcagagataaacttgatccgttaatttttcacctgtaatatccaatgccccaaagatcccaccaagggttacaataccagttccttggatatcatcgttaaaggttgggatttgcttccggtatttttcaaggatgttagcagcatttaagcgaccaaaatcttcccagtgcagatagagtttagggaagaggcgttctgcagtttgaacaaattgatcgataaaatcataataacgatctccacgcacacgttcgtgacgatttcctaagtaattaggattgttacgcaattcttcacggttggtacctgcatcaatgaccaaaggaagcaccgttgaaggatcgattcctgcagctccagtatagaccatcaatttcccaacagaaatatcaacaccatttgtaccccagtcaccaataccgagaataccttctgcatctgtcacaacaataagacgaatttcacggtcccctgctgcatttttcaaagttgcttcgatattttcaggatgattgatatcaagatatgcggcatattgtggatctacaaagagatcgctatacccttcaatggtatcagcaatggttgggtcatagacaatgggattaaattcttccaaatgttgagcaaataggtagtaaaatagagtacgatttgtattaaaaatttccattaggaacaaacgtttttccaaatcattaacctttgtttgcatttgcgcataagtttgcgctgcttgttcttcaatggtttgaacgtaaggtggtaggaggccaatgagacctagttgcttacgttcctctaaagtaaaggcagttcccttgttaaggaaagggttgtttaaaatatcatgtgcagtcatcatgtgacctccttatttattttattctattataacacttattttctttaaatgacactttgttatgtatatgatacaatatgaatgaatcaggcaatgaatgttcaggcgatgcaaccgaaaatgatgcgatttcaaaagataacaaaataataggtttatccatcacttcctagatagtcacggtcatctcttaaaaaagcctgttcctttccaccttttagaaggttattctcatcaaaagatccactgttttcaggtactcttttttccacttatgatgatcaatacctataaaaaccatagataataaatctaaaatatgtttgttataaaatactttgttttgtttaaggtgttatttttgtcatttaaaacttgtattctggttacatgaaaacaaaacattatttacaacggtatatagcgcaaaaggtcaaatatttgcgaaaaaaacaaaacatgagtcaagaggagctatcggaacgggcagatcttggattaaaatacatcaatcaattggaaaatcaaaacgtgaatctgaccattcacagtcttgaaaaagtcatttctgctcttgagttaacgcctgaagaattcttcaattttgattcactcgaagcgtcttcagatcctactgacagcctttcacttaagagagtaaatatgaaaattaagcaacttccagttggaaaaagggagaagatcctaacgattttcgaagatcttttagatagcctttaatggtcctctgactcacctcagattgtaacaaacaaaaaatcatatagtcaaattagctatcacggataatttttgcttatccatgtctgtctatttagaagagggagcccaatgaatcttaaggacttttattattttcttgatcttagtcaacagcaatcctttactggggttgcccaaaaacacgggatcagtcaaccatccgtttcctatgcgattaaacgactagaaaaggaatttcactgtccattaatcgcgcacgatccttctcatcgtactttcaaattgacgccccaaggagaaatcttgctacgacatattcaaaaggtcttacctgagattcaaggggccaaaaaagagatcctccggagtctctctcaattcaatacggttggtttcccaccaatcatcattgactatcttgtccgaaaacaacccgcctttatcagtaatgttgcagctcttcaaagtatccatcctgtccaagaaggatctgttgaacttttagaaatgctttccaaaggagaactagatgctagttttttagggagtttagaaccgattaaagatcatcgcttccaggtaagagaaatggccaaacgagatctcttctatatccttcatcacaaccatccactagcctcaaaaaaagtattacaattttcagacgtcatcgatgaagattttatcattccagacgagcactttgttcatttaaaagcctttgaacagttgaatgagcgctatcaccatgaggctacgcccttctttcagacggatgatattcagctcctaaaacaacttcttcgtaaacaagtggggatcagtttactagcagatcttgcactaacagatgatgaagaggaattgattgccattccgatggatgaagacgaacggatcagcttttacgtttcattagttgaaccgagggaaagtaatctcaaaccggaggtcatccaattctttgaaaaattactaagctaatcacaacctccattctttgtcctgatttagaaacataaataaagtgactagctagtattttttacgactaaaaaatatagtagaaatgccgataaaataaggattcctgcaaatttgtgggaatcctattttctttcgtatgtattgtataattaaattattttgtgtatattttgcttattcagcttattattaataattagagatataaaaagctcgcaaagccttgattattataccgttgacaagcttttcaaaaacctgtatgatagaaaaaagtttattaaaaaggggacgtattttgaaaaaatatactatttcacgtaaacaaactttaactttagcttccgttgttttaggaacggtcttcacaggaacgactattgcttctgctgatgacgttgcacctgcaacaacccaagctgctcctgcagctactacagcaacaaaatcacctatcactgctgcaacagaagaaatcaacgccaaagccaatacaccagttgttcctgctgataaagcaaaaactggagatgtcatcgctgtggacgtcaaaaaaactggcccatctgctaaaacagacggtgcagacaccaccactacctcaacagcaaccatcaaaacgactagcttagccgatcaagacacacctgttggcacttcaaaaccagtctcttctaccaagacagctacatcaaccaaagaaacagctgactacactgagacaacaactgaaacagtcaacaaaacaactgtagtcgaagtgacaaaagaagccgatgtcgtcaacaaaaaagaagtccaaggaacatcagacatcgtctttgtcatcgataaatcaacttcgatggattcacatatcaatgatacaatgaagaatatcgagtcctttgttcgcaatctatctgctaagaaaattcaagcccgtttaggattagctgaatacgaaagagctagtgaagttaaataccatgatttcaatggatcgaagttcacaagtgatccagaaagcttcatttccgccctgaaaaccatcaaaactgatggctactatgaaaatgctactgttccattgcatcatatcgctacttcaggagactacaactgggggactggggcaaacaaccatcgctttgctttcttgattacagatgaggacattgatcttacaaaggatacaccaacaaaagaagcgacactgaaagcccttcaagatgctggtatctctttgacagtggttggtgaaacacgtgaaaaaaaagactttgatccattggtcaatggaacaaatggtctctacctagatatcgacaaaaactttgctaacttgttgaacgttcaatttgccaataaagtcgttgaaaccgtccaaaaaggtcgtgtcttcaaggtacaaacagacaagtatgagttgatctcaaaaactcatcgtgtggcgaaagcaaaaccacaaacacctagcatccaaacgcctgcaacaccgactcctactcctcaaaaaccggctgttgtaacccctgcgaaaccgaccgtattcacaccggctaaaaacgagcctgtgaaaacggaagtttatatcgcaccagcagctcttcctcaaaaagaagcaagccttccaaatacaggaagcaagacctcaattgctttgacgactctaggtcttggtcttcttagcatgggtgctgcctttggcctctctcgtaaaacaaagaaagactaacatgaaaagctaatccgttgattgggctttttatcactcaaaatttcccctttgctattttcattagaaagcggaaatcttcaacttctaccaagaaattcttgtcctccgctatgatataatggggacagtacaagggaggaaaccaatgttacaagaactagcctttacaggccaatggagacgctatcaaaaacgcgttctcgataagagtgacgcttttatggcggatggccatctgcatttggtagcagcgcctggctctggaaaaacaaccctgggaatcgaatttatcagacgcttcggccagccaaccctgatcttagctcctacggtcaccattcgtcaacaatgggtggaccggattatccaagcattcttgaaagatgaaagccaggcagagcaactgatctctcaggacctcaaacatcctaagctaattacagtggctacctatcaggctctacacagtgccatgaaccaagtcgtcggtcaatcgcaagctgaggataccgatgaccaggcagagattgaaacatttgatttcaaaggctttgatatctttactactttcaaagacatctcactcgggaccctttgtttagatgagtgtcaccacttgcgcaatgaatggtggaagagtttggaagcctttcgtcaagccttccctgacttaaagatgatctccctcaccgctacccctccctatgaaggagaccctgccctttgggatcgctatatccgcatgtgtggtgagatcgatgaggaaattacggttcccgaattggtcaaggaagacaccctttgtcctcaccaagactatgtctactttgcctttccaaccaaggaagagcaagagcagttggatgcttttagccaacaaaagaatgctctcttgcagcaactgacttcagatcctctcttttgccaatacctccaaacctgccaggccttatctggtcagatcagtgatgatgagctactcaatgagccccagtatctctctgctaccctgatctttcttcgaagcaagggaatcgcctttcccaaacgtttccaggaccttttaggagccaagaaactacctactttcaccctggactggcttgaaattctcctgcaaggtctgctctttcaagtgcctcactggtacaatctacctgaggaatacgagaagcaagtcctccatgaactaaaagcagccagcttgatcgatcgaaaacaagttaaacttgtccgcaacaaaaaacaagaccttctgctcaaccaatccctcggaaaactcaatgccgttcgtgagattttcaaggcggaataccaggcgcttggaaatcaactgcgccaactggtcctaacagactatatccgccaagactttgaagttcatctcggggataaggacgcccaatttactcaattgggagttctctcttatttcgaatccattcgcagggaaagcttagagcaagcaactcctcctgccatcgctgttttgaccggtagcatcgtcatcattccgacggtcgctaagtcaagactagaagagcttctaggagggaatcgactgacttaccaaagtgtcggccaattatctcctgatgactttctcaaggttcgcttggttggttctcagcatgatttggtgacagccgtgacccagctctttcaagaagggctcatccaagtcgtcattggaaccaagtcacttctaggggaaggctgggatgctccttgcgtcaattccctgatcctagcgagctttgtcggcagttttatgctcagtaaccaaatgcggggtcgtgccatccgagtgtggcctgaggatccagacaagaccagtaacatctggcatctagtctctatcaacctttccctaaagaaatggtatgaaaagtccgatcttgaaaaggaagagatcgaagccatcactgatcagttgaaagaatacagtcctgatttggagctcttagaaagacggatgaagcaatttttaggccttcattacaaggagcccttcatcgaatccggtatcgaacgcctagcctttgacaatattcgctataccaaaaaacagttacaaaaactcaatgaagagaccttagagcgctccacccatcgtcaagaactccgagacggctggcaaaaagccctgcctattctggagaatatggagattgcaaatgaggtccaagtggataaacacttcctgcctctggccctattcttcgatgccagaaagctggctcgttggctgacggccgccactttgaccgatgctttcgccaaccttttttactattcacatagaggaggagggaataaagcgtctctaattcttctattcgttttagctgttctcgctctccttgcctggctccgctactatctctataagagcccttataaacggttagaggtctttggacaagctattcaccaagccttgctcctctctgggcatattcaaacccaggagacccgtatccaagtcgtacgagacagaaaggatgccatcaacacgctgatttatttgaagggcggaaccatgcgggagaaggaactcttctcgcaaaccataatcgaattcttcgcaccgattgaaaatcagcgctatatcttgaaagcacaggaaaaggtatccgatcaaacagaatatttcgctgtaccaagcctctttgacaaacggaaagaggatgcccaagcctttgtcgcgcaaatccgaaagagtataggcaagtatgacctcgtctatacccgaagtgtcgaaggtcgcgccattctcctagatgctcgcatcaaggctctagctaacaaacaagagcgcaccttcaccaagaaacaagtgatgtcggatttgaaataaaactgatttcactacaaaaaaattctagtagacatcctctactagaattttttgttagtcaagtacaatcatagccttaatagtcttacgttcatccatgtccttataagcttggtcgatatcttccagtttatagcttgaagtaaagacacgacccggattaatatcaccgtcaagaactgcttttaacaaaacttgtttatcataagtagtaactgaggctgctccacctgccactgagatattttgggcgaaggtcgaaccaagggcacggttattgtagtgtggcacaccgacaaatcccatacgtccaccattgtgaaggaccccaagggcttgatcgacagctgccgcggtaccgacacattcaagggccgcatctgctcctcctccgaggatttcacgaaccttggcaatcccttcttcaccacgctcagccacaaccgctgtcgcgcctgactccaaggccatctgttgacggtcttcgtggcgactcataaggacgatttgagacgcaccacgcatcttagctgcgatcactgcacattgaccaacggcaccgtccccaatgaccacgactttgtcacctttttgcacatctgctacacgcgccgcatgatagcccgtcggcatgacatctgctagcgtcaagaaggatttaagcatagcttctgtataatcagaaggttgccctggaatcttgacaagggcccaattagcaaagtggaaacggatgtactccgcttgcactccatcagaccagttggtgccgatatgacggtcacaagtcccatcgtagccagcacgacaggcatcacactctccacagccatgggtgaaaggtgcaatgacaaaatctcccggtttgaccgttgtaatggcctcaccgatttcttcgacaatcccaatggcttcgtggccactattttggtgccccgcttcaatatctggattacggtagctccatagatcggatccacagacacaggtgcgaacgatacggagaatgacatcatctggcgcttcgatctgtggacgttccacttctacaaggcccacttgcccagcttctgtatagactgttttcttcatagggacgacctactttctattgcttacttatctatagtatacactttttatcgagcttctgctcataccaagtcgtcattaatggtggtgatgatcatgcccatgaccttgatcagtttccaggtcttcgatatttctcttgtgagctcggtgggttgccaagtcttcatctacctcaatggtgacgttttgaaagccacaatctttgagcaaggtacgaatcgcttctttacaaacctccatgtggttgacatgctctagacaaacatggacaatggcgttcttttccagcccatccatggtccagagattaagctgattgatactagccacatggtccaactgttccaaatcactcttgacttgctggatatctactccttctggcacggcatccaggaaaatcctgagcgtgctccaaaaacgtggaatggcttttgacagaataaagatggaaatggcaagagataagagcggatccaggatataccagtcggtaaatcggagaacaatggccattaagatgacagccacccaacctaaggtatcttccagaaagtgcaggctgagaatggattcgttcttggtttgccctttgcgaatgacgagactcgctagcacattgatgctgacggctatgattccaagccagagaatgccctcatcgttgacaggttgtgggtgaaccaatttcgttatattttccaaaataaccagaacggaccctgtcatgagaatcacagctgttaccatggcccctaaaaggctaaagcgcttgtagcccaaggtatagtggctgtcttcttcacgattggaaatactctccaaaaaggcggagatcccaatagcgattgcatcccccaagtcatggaccgaatccgcaaggactgcactggatccaaaaatccctcctgcaataaactcaacaatggcataactcaaattcaagaaaaaagcgatccagaccgcatgttttgtcttcataatccttaatcctctgatataatagattcatgaacatcatgttcattatctattatccactactatcaacagaaaggataggagcaaactgtttagggtgtacgttactgaacaatttgttcaaattgtccatatgaatactcaggatcgtcgcatcaccaaaactcgaaaagctatctatcaagctttcttacacttactcaaccaaaaagactacgaggccatcaccgttcaggaaattatagaccttgctgatgtggggcgctcgaccttttacagccattacgagagcaaggaattattgctagatgaactctgtcaaaaactctttcaccatctctttgagcgtgctgaacacctctcaccacaagactatctggcccatatcttccagcatttcaagaaaaatcaagatcatgtgaccagtctcttgctctctaaaaacgattattttatacggcaactgcgaaaagaactagaacacgatgtctacccaatggtagccgacgaactcatcaaggcccatccaactctccctcactcttacctcaaacacctggtcgtcagccatttcatcgaaaccctcagctggtggttgaaaaaaggcaagtcctacaccgaacaagaagtgacccagttttatttggagattttaaaagtggggtcgaactagaagggagtattttcaatgaccagcgtacaattttactttctatttccatcactcttcatgcttcacgaactggaagaaatcgtttggatgccatcctttgtcaaaaaaatatcaatccagtatccaaacaatcgaatcctaacttattacactccttttgctttcaactttattgtcttggagcaatttctcatcctaatgacgtctctatatcttagttaccagtttaataactatagcatttacgcaagcatcataatcgcttatatctaccatgtattcggacatctgattcaaacaatcgttatacgaaaatacgtgcctgggttgttaacgggcattttaacaagttacttttctatcatttccctcaaaaatgaaattccaattacactttatggttactctctttttaccttattggttattattttaaatcttgtagtatcatttatgattcttcataaaatcagtcataaaaaatagtactcaggcaatcatatcttagaaaggaaaccctatgttcttccccattcttctcggctttttgacagccttctttgcccttgcttttgctcttcttcacttattggcttctctttctgaagttaaaaaaggaaatcacactctaggaaatacatttctcctcatcggaagtagtcttgcgaccttatctctcaccctctacttctttttaccgattgtctctctagtcctttggttgatcggctgtggtttgatttgctacggggcctattggaatgggaaacacaaaggaaacttccacccagtccaccacctgattcgaatgggcatcgctctggtgattacaattttattagctctcatataagaaaagctcaagtttgcagaaaaacttgagcttttgtagtttctatttgttaagccattaacagcatgagaatagggatcaccaccatggttgcaagggtcgtctctgtcaccatgaccgctgcgtaatcactatcagctccgtagagcctggcaacgaccggggcattagtcatcacaggcatggcagactggatgataaagacttgcttcatcaagcttggaagaggggcccagtaaacaatggtcgccattaggagtggagcaaccacgaagcgtcctagtagaatgaggagctgatcttttccaagtaccaactgcttcacgcctacatgagataccgacaaaccaatgaaaatcatggataagggggttgttaaattgcccagatactgcaaatcactggctagaaatgcagggagctttatctgcagcatcaccatgactagtcctaagagaaagcccatgaggggaggagaaaagacttttttcagactggttctgatatcaaactgcgcttctccttcgccatctcgctggatcaggtagctccccaaggtccagaaaaaggtcgtattacacatgtaatagatcaaaacatagggaatactggcatctccaaagagagcttggttaataggaagccccacgaagatagtattggagttaaaaaacatggaaataaagaggccacgacggtcctgtctcaccgcaaagatcctggctactcctgtcgcgatgccaagcaaaataaccatagacagggcaggaaaacgcagttctggcaacatttttaggaggtcagccgctgtaaaacgctgtgtaatggtataaagcatatagcagggaagagcaatttgagtgactaattttgcgatcaggccacgtgacttgtcatcaaaccagcctttttcacctatgacaaagcccactaaaatcatacctagaatgaccaggatccctgatatactcctcaaaaagatctccatgttttctccttttacttctttgaaatgaacgtttttccacaagtctcaaaaactactctagtatatcataaaaagaggtggggcaacatgcccaacctcatgcattttattaattgtcactaataccccttcttagcagccttcgtccattgataccaaccaaccagactattgatcaagtaaataaagtatttcccttgaatttgaaggctttctccccaccacaaatagatagagaaaacattggtagcagcccaaaaaatccattgttcgcggtaaacagctgtcatcaagagctgaccaacaccatttgtcgcatcagtaatagaatcacggaacggacgattggcgccaacggattggtaaatgaaaccaaaggttaaccaccaaagcacactaattgataagtacttgatccatcccaccgcatccaatttacgggcaacaaattcctgctgttcttttttgaactgggcttgatagatcaaaaagtgttaaaaataagacagtaacctcagaatagatactgtcttatctctttttttacttaaagccttgatagacttgacaaatggtagaaaagaaccgtgagttcttgccagaagctgaagttaatccttcaacctggaaaacccgcagaggtgactttttctatacatctcgatttttctggcaataatcattaaccgataaatatgtctgtgaatcacccagcgactccgctatgtccataatccgcggtggtagtaatcccactcgctggacaagttcgtgatcgctgaacaattcccgtggactgccggcgaagccaaacttcccgtgttccataacatacacagactcaaactcggcggcgacccaatccatgtcatgggtgatggtcacaacttggtggcccgaatcagccaactgatggaaaattgcggtcaacttgcgccggctttcccaatcaagcgacatcatcggctcatcaaataaataaatcgccggatccactgccaaaactgtggcaacgctcaacagcttgcgttccgacaatgacaggtcatatggactttcagctgttttatcatccaagccaactctttttagagccgctaaagcccgcctcgtaatcgtgtcgtggtcatccatgacctgcgcgacactccactccacctctcgttgaacggtcgggttgaaaagctgatcgtcaggattctgaaaagtaatcccaaccttcagtaacttttcgactggtttaagatcattaaaattttctccatcgatcttaatcacaccggtttgtggtgtcagcaagcccgtcaacaatttgaagagcgttgatttaccggcaccattttggccgacaatcgccaccatcggatcggcgaagtgtttgtattcaacatccaagctaaaggaccgttccggataagtgaacgtcaggttgctcagttcaattgtggacataacgaacctccttcagatcagcgccattcaccggataccggccatcagccaagtgccaatccattttttgagcaagttgctggattgtcggggctggaatctgccagtcagctaccaaatgattaaacacctcacccggcctgccctgggctaccatttgaccctcgtgcagcacccacacaacgtcggcgacttcgcacaaatcgtcaatttcactggtgacaatgaagacagtcgtctctttgacttgggccagccattggaaaaattgccggcggccaaggggatccatctgactggtcggatcatccataatcaaaacagccggattagccacaatcgccgtggcaattgccaaccgctggatctgaccaccggaaaggctctcgggacgcaaattcagctgttcaatcagccccatttgcgtggcaacttcttcaacccgtttttgaatcagtccttcagccattccctgattaatcaagtcaaaggcgatttcatcggcaaccgtttctgccaacccacttagttggccagctggattttgcagtacaactccattcatggcattataaacgggccaattgtcggacactcgctggccaaacatgtgccagtcgccctcaatctcagcagacacaattttgggaatgacccctgccagcacacggcacaaagtcgatttgccggagtggctattcccgataatcccaaccacctggccggtatgaacctccgcgttaatatgacgcagttgtggttgctcagtacccggataacgggtggtcaaattttcaattacaatccgtttatcttcgtccatatcttccacccaatcaataaaattgccaatccagtcagaccaatgtgcagcgtccgcgacaggcgatacacgcgctgggaggttctgacagtccggttgggattatcaaaacctctcagttggagagaaatcgaccgcgccatcgattgatccaaggtcttaatcaccaatggaattagaaccggcaggactgactttaatttctgaatcaacgttttttgcggattggttccgcgaactttttgtgcctgctggattttcctcatattgcgcatcatttccggcaaaatataacacaccgacatcagaacgtagacggttttataagacaatccggacagttccaaataggccgcgttttctgaaatactcgtggtcaccataaaaaagccactggtcaaaataatcaccaatactcgacaacccagagtggtggcgtaaatcaggccttctttgtagaacgacaccccaagcacagaaaacagcacagtttgattccgactgtaaaataacccttggatgatcagcatggtgcaaatcagaaacaggctgaatcccagcgccttaaagatggtagaactcaatttagaaaataacaatagcagtgttgcgacaagaattaatccggcctgaagcaataaattcatactggcaaagctcaacaacgtcatgtccaagatgaacaagagcttagtaatcggatcgatcacctggtaccacttgagcttgacccgtggcgctccagaaatcaatgtttgatcagtcatcatttatcaccgctaaagaagtgcaccatccgcttcggcagctgacgatagatgaagaatgccaggtaggccacgcagactttatccaaaatatccaagacaaactcatcggtaaatgaggccagccacactggtgcatgattggcgaccattaccgcaaacaatgagtcaccccaagcgataccggtctgaccaccccaaaagatgacgttgagtggcgttgaaatgacagctgaaacgatggcaataataatagcagaaacaaatactcgtcgcgctgacgagaaccacccattggcgtgcaaaactccgacagcaatcccaattccgatgctggtaatcgcatacacggttgaaattggcgataaggtcagcccatagatcacgttgttgatgaaaccactgatggcaccggcaaccggcccagccaacatgctggcaagaaaggttcccaaagaccccagccaaacgggcaactttaacccctccgccaaggctttggcaacatagttaatccccacggcagcgggaatcaaagtcatggtggcagcacttaacttaaatttccacatactggtacgatgaatcggttctgttttcataatcttctccttttgtttttaaagagccgtgtctgtttagactttcggacgcaacgctctatagatttttgatttgaaccgcttcacctttcacatatcccttagtcgacatcagggtttctcttgaaaaggattgttcaacagttcacaactaatcatacgcctatttcatcagaagtcaagaattttctgaagttttcttgaaaacgttcgggaattgaaaaatagagcgagcgcccatgagaacgatcgctaaacaattataagaggccactataaaaaacaaacaccatttctggtgtttgttgtgaacagagaaaaactgttcttttatataaatctaataacttctttaaagttttatttattagtgttattcgaccatcttctgaaactttcctctgtgagaaaagtgctagaaacaataatgtttctagcactcggaattattgagaccttaggctcaataattagtcatggaacttcttcgaagttcgctgacgtccgcactcacctatggaaagtttctaagatgactttgtctttaatatgaacaaacaccatttctggtgtttgtttcattttataaaggaagcactagcttattttttctttttcttcaaaatataagctgcaatgcttgccaagacaaaggctaaaactaagctaataatagagatggtcgtacctgtatttggtaagaatcctaagatcttgcctggtttcttcggctctggttgacttggttttttaggttcaggttgacccggtttctttggttcagatgaacttggaggagttggttgttttggagtttcttttggaacatgcttgttagtaatcacaacatttcctttaccatcctcgtcgttacgagcttcatagccctttggaacactgacttctctcactgtataagtgatggtgtttccatttgctttttcatctaaatctgcaaaggtatgggtccacttgttttcagctgacaattctacttcttgaccgactttttgatcattggcatagagttgaacgcgaatactcttcggacgaattccatccttgtcattctcatcatcccacttcttagtgaccgtgatgcttgtcttaccaggtgcatgggtgttggtaatggtataagcagcctgatcaattgtagtcgtatagtcagctaccttctcttcttgaagagtatagacgatttcttttccatccttgaattttggtagacctgtgaagctttctttccaatctgtcgcattcgtgagttctttttgagcaactttttcaccattggcaagaagattcactacgatacttgctggacgaagaccatcttgattgtcttggtcattccaaatcttggtcactggaatatcgatcacttctggcgtatgcgtattggtcaagatcgtgtgagcagcgtcagaagtatcagcagtgacttggtagccttcaggaacagcgacttcttccacacggtagctgatagcttgaccagctttcttttcagctaatttgctaaaggtatgagtccattgattgtccgctgacaactcaactggatctcctactttttcatccccagcatagagttgaaccttgatcgattttggacgaagaccatcttggtcgttggcatcttcccatttcttcgtgactttcatctctgtaagagctggttcatgcgtattggtcaaggcaacattggccttgtccttatcatttaccgttactttgtaaccatctgggacagttacttctttgactgtatatgcaattgcttttccagctgccttggcatcaaggttttcaaatgcacctttccagtcattcgcggctgaaagttctaccacttgatccgtcgcaagaccatctttgtataattgaacttgaatgctggctggacggagaccatcttggtcgtctccatcttcccacttcttgctcacttctactttggtcttttctggttcgtgcgtgttggtcacgactacttgacctgggttgcttgcttcgacggcttgtgtgtagccttctggaacatcgatttcttttactgtatagttgataacttggccagctttcttctcgtctaagtttgagaaggtatgggtccatttgttatctgctgacaattcaatagccttaccaaccttttgatcaccagcatacaattgaaccttgattgtttttggacgaaggccatcttggttattggcatccttccagtttttcgtaacagtaaggcttgtcttacctggtttgtaagtattggtaatcgtcgttccatcaatcttagtagtgtaattgtccactttgtcttctgtcactgtgtagacaactttttgaccatctttatagacgggtaggtctgtgaaggtatgagtccattcatctccttcaccagtcaggtcaagtgcttgcacctctgttccatttgccaagaggtgaactttgatggtagatgggcgaagaccgtcttggttttgtgcatcatcccagactttcttgactgtaaccgtcgttgtctcaggagtgcgcttgttggtgatggtggcttttccatctgtgaagctggcttcttctgtatcgaccgtataatgagtcggaactttcacttctttaacagtgtaggtgatgagcttgccatcactgtctttatctggaaggttcgtaaagtgagctttccagtctgttgctgctgaaaccgtgactggttttccttgagctttgccattcttgtaaagttggaattccacacttgctggtcgaagcccttcttggttgtcttggtcatcccaaacttttgaagcttcaagatcgagatacttgatatctgcttcattagcgatctcaactgggactgcttttgagccaaccgcttttccatccaccgtgacgtggtagatttgtttgtccgcatcataggtgacaaccacagcatgttctgtttcatccaacttgtagttttcaggtgctttgatttctttgagcgtataggttccttctgttaaggtgttaaaggagagttctccatttttatcagaagtggccgtcgcaacaaccgcaccatttgcatcagttaaggtaaattcagcaccttcaaggactttcttaggatcatccttgtctaccttcttgacttggaaagcagccgagaagatttgtgcagttacggtattagactcacgatttccttcgtgacctttcgccttgtaaccaaactggttatgagcttgaacaagaccggaacgaccgccgttatcttcattatctttggtgcgtttttgcatcaaggccttgacttcatcggtcaattcacttggattcacgactgggacaccaaagctggcttctccacgcgcaggaatcgtagttcctgcatttgcaactaacttgattcctgttacttgactgtaatcagccacagctgtcgtccagatatccttgtcagcagcttgcgccatggtatctgtcgtaacgcctgtatcagttgtatagtagaccgtccatccttctggagctgtcactggtccacgaaggctgaccgtgtattctgtcatccgaccagatccgtctagtgtgttaacgtcttttacttttggtaggacatcatagacgactccgtcttctactgccttatccgtattatttttaatggtgagtttgtagttaaaggtttcacctggtttgaaggtacgtgtcacaatcgaagcgtctgacaggtcatcatttttagcgatatatttgcgtgcatagattccttcagccgcaacaatcgtatagtttgattgagcatatgggattttatccgttgttgaaccatttccattcagatcgtaaacgtcttccgtgacccgatcagggttggcattttcaagatcgtggatcccgtttccagcgacatatactttatttgtgaaggtaccaccatcatctttccctttcagatcagccacaataaacggtagacgcacgcggttaagatctttcagagaagccttaataaactctttttggtccaaatgcatgatgagagctgtccgtccagagttgtgatagttttcaatgacatcgtaactctttaagaatttcatacctttttcattagaggcaaggtttctctcaaaatctttatagtcgactttaagggtatttggatcatacagatcaatgattcgcaggtctccataatccttatcaggatctaaaactactttggttgccatcaaaccaaaacgaatattttctccatcagtataacgaacatcattgtaatccgtcgtttttgaaatctcaaagctttccttcaaaggaatcagcttaaaggtccaatctgatgtttggtctttagcaatatttgattgtgtttgataagtgacacgacctgtattcttgaattcattcttggtcgcatcattttcatcgtaacgagtcttttctggatctttgaagcttgtataggtattgaggcgaattccttgaccagattttaggacaaaatcatccttcatttccatccgccaaccgacaactgttccatacttggttaaatcgatcaagccattgccgtctttatcagtttctggctgaatttcttttttactaccatcgtccaaagtaaggatcaagcgtttcacatatttgctaacaaactcgccatttccataattcccttgcatgagacgagcgtaatcaattttggtaaattttaaccgagagtcaactgtctcatcatagaaaacaaaattcttttgtggtgaaggagttttgttatcaaaggctatgatccacttataatttgctgctttatattcagttgaatcatagacatcaccatctgcttttttggcaaaacttccagccccttcaaggtcacgagaagtcaagcggaaaatgagggaatcttcagctgtaatatccggttctccctctccacggttggcaggaatccctacgatgctaccagtattggtcaaatccttactaaggacatccttgagggtttggtctttttctaagaccaaatcagggaatttcaagtagaggtaacttgtatccttgattttggtcataaattcttggtgataagctgctggattgttgtttgcatccgccttgaaagtcttcgtaacggtaccatctccattgtctacccagccttcagacttggttgtatcaagaacagctgtacgagtcttcccacttttatctgtataggttggtaacttatcagtgatcgttgctgattctaactgacggtattgaccaccgtattgaccacgcattccgtccaattggaaggcaaatgggacagaagttggtgtttcaatatagttcttaccatccgcacctttgacaatacctggcattgcttccgcatagtccttagacatggcttcgttcaagttttggttgatgtacttggtgaagcgatagtcgttgtacttgggtttccaaatgatatcattgagcgctgtttcctgcccattgatgttcaaggtacccgtaatatccaatgaataattggtcggtgcataaccgactttaaattttccaataaatggtagagttaggacctctgacttttggtaattgttaaagtgaagtgtgacttgataatcatctccaacttttgtaaccgttggtttgtcatgctctgaagcactattgaagtcagggaaactaacttctcgtaagtactttccaggaaccttcaaggtcaccgttacttcattaatatccgttgtcaaattcttaggggtgatctggatataaccagacatggtatcccctgtgtaataggacatcccatctggatggttctgtttatccccatacataagggcaacatccaaggccccattatccccgactgctagctcattggcaaaggctgtgatcgccccttggccaagctggcctagcatcatgaaaattgttaaaatggcaaaaccttttttcaaaaagtctttccataatgaacgaagctttttcatgtcttatctcctttacttttgttagccttccaaaaggccctccctttaattttatcacttattttttaaaatatcctttgcttttcaaattaaatcatcactattcaataatatagacattatttacaatgatgtctatattataaatcactatctggtactgatttcccctttcttatatccaagggcaagaaaataaaacatttataaacaaggaggagcagtctgccaattcttattcttccttgattttcttcatacaaaaaaactcaaacacatctgcttgagttttgtacaccctactattggttggttattttatctaactcttcaccatttgaaggaatcttttgtttttcccttctctctcgtacccacagcatggctagtccaaagaggtggctgccaaacaaggccgtcacaaaaatcagcttgcccctgtctggataagagagaggggggctgctaaagccatagcgagcccactcgataaagatcggatgcgaaaagtaaagagctatactcatttgctttaaatactgtaaattatagcttttcaaaaaggacgatcgcaggcaggcattgacaaaataaacggtcacaaaaggaagaagaaagaaaaagttcttatcaattccttcgtgttgaaaaataatgatcccttctagacagagcaatccaaaggcaagagctagcttttgccaacggtgaattctaaaagtttgtgcatgaaaatggtcatacagataataacccatataaataaaaatgggcgtgtaaaagagaccatttcgcgctgtaaaaaataaattgctgtagagctggtaacctttgagaagacttgttgtgtccagataagccgaataggtctcgatcaagccccagcaataaagaagaaaggtgatcaaccccgtccaaaccatacctaggtatttgaccaattgattgaccaaaaacaaacccagcaaaaaggctgggatataccagagttggtagcacatccccagatagatcagtgcaatgagaacacctgctggaaaaagatagacaggaagacgaagactagagaaaaagagccaagcatacggaaggtaaacaaaactccaaaacaaataggtttttacgattttgaccagataggccttcattttctgagaattccctagtgattgcttaaagaaaaagctggcacagacgataaaaaatggcaccgctagccggccaagcatactcttgagaccaaaatgcaccggctcatatgaagttaagcgaccactatgcaccaaaatcactgcaatcgcaaacagatattgaaagagactaatactagaagtattgtagagggaattcttttgcatgttcctactccttgcaaaatgcagaatctaaggttattttagcatgaaagaaaggccggggcaaggaatcttgtatcctgatctaccttttttcctctatttttgatatactcaaagcatgcacaaacaaacgattattgattttaaagaacttggattgcgacaccttttcaccaagcccataaaagaattaaaaaccagagacctcgaccaagtagaggcacttcttaaagaagtggaaacttaccaggaggctggtttttatgctgtcggctatgtcagctatgaggcagcacctgcatttgagaaaaaattagctgtccaccctgctcctctcatgggagagtatctcctctacttcactatccaccaggaggttgaaacccttcctttcccagaggactatgaagcagtggacctgccagccaattggaaggaagaggtcgaggctcccgcttaccaagaagccatcaagactatccatcaccacatccgccagggggatacctatcaggtcaactacaccgtccagctttctcaagagctagaggcggatcctctcgccatctacaaccgactagtggtagagcagaaagctcattacaatgccttcatccaacatgatgatgtagccatcctctccattagccctgagctcttttttgagcaagacgaccggctactgaccactcgccctatgaagggaacgacacgccgcgggcttaccaaccaagcggatctcaaagaggctgcttggctagaagccgatccaaaaaatcgagcagaaaacatgatgatcgtcgacctcctccgcaatgacatgaaccggatttcggagattggaagtgagcaggtgacccatctctgccaagtcgagcaatactccaccgtttggcagatgacctcgaccattgaaagtcacttacgagctgagatcgacctggtccaaaccttccgagctctctttccttgtggctcgattacaggagcaccaaagatctccactatggaaatcatccaaaagacggagaaggctcctcgaggtgtctactgtggaacgatcggcatccttcttccaaaagggaaacggatttttaatgtggccatccggacccttcaaatgcagggggatcaagccatctatggcgtgggaggaggcatcacttgggatagcaaatgggaaggtgaataccaggaaaccaagcaaaaatcggctgtcctctaccgacaagagtctcactttgagctcctgacgaccggccgcatccaccaaggagagttgactttcttagaccaacatttaacacgcttgagggaagctagtcgctactttgcctatccttatgatgagtcgaagctcctgaaagaacttcaagaagagcttgctcatttggagtccaaccttgattatcgttgtcggattgccttgcaaaaaaacgggaccttccacctagagatcacggagctgacagacttgccagctagctatctacaggcccaactgacagagcagaagcttgatttagcgacgccatttacttatttcaaaacgagtcagagagaccatctcaaccagtcagatcacgagcaaattttccatctgccagacggaaccttgctagagacgacgattggcaatctggtgctggagatagagggacaactctataccccaccagctcacctccccttactcgatggcatttatcggcgccatcttcttgagacccagcaggtggaagaaaaactcttgactctgaacgatttaacagacgctgatcgtatttatgcctgcaatgctcttcgtggtctctacgaactcgattttcaaagaaaggattcctgatgaaacttatttttttacatggactagggcaagatgtcctctcttggcaaggagtccaatttgcactttcacccttgcactccaaaacttttgatattttctcccatccaaaagaaagctatcaggaagtcaaagaaaggttgatggagcgcctccagcaagaaagcgaaccctttattctggtaggactctcactaggtggcgtgctcgctcttgatctctccagacaagacttcccgcaactcaagggcttagtccttgtaggaacacaatacaaacttaacaccaatcccctctatcggctccagatccttctctttcgtctacttcccaagcatgtctttgaaaaacaagatgccaataaacaacagatgcttcaaatcttgaccgaattaaaagggctcaatttaaccgataccgttaaagcttgccctcttcctagcttagttgtttgtggtagcagagattgggccaatcaatcttcttctaaaaaattggccaagctcctgccaaaaggccgctatcaagaaattgcagacggaggccatctactcaataccgagaaaccctatgaactcgcgcaagccatcaaggagtttgtcgctgggttttaaaatgaagaggctagcttaaaaaacagttcctcttaatgtagataaagtattttttcatgttatataacttaaaaaatcaagaactttaaagaaatgtttatttttaaagttatgcatgaatttcttgaggctttccgccgtgagaaaagtgcctgaaacacaattgtttcaggcactcgggagttttgagaccttagactcaaaactaagtcatggaacttctttgaagttcgctgacgtccgtactcacctaaggaaagcctctaggaaaacttagtcttaaagtcacggctaactttttaaaagttagtcgtttttttagaaatatttgagaattgcttgatagttatttgaaaagcaagctgtatactaagagtgtaaagaaaacaactagtcatttggacgaaggagaaaaccatggaaaaagtattagaaatttcccatttgagtaaaaaatttggtcaacaatacgccttaaatgatgtgaatctcaccattcgcaaaggcgacgtttatggcctgatcggtaagaacggggctgggaaaaccactctcatcaagatcatcacccagctgattcaagaaactgacggaagcgtctctctctttgcttctacaaatcgctcccagtggacccaagccttgaaacgggttggatctgtcattgaaagtcccgtggctcacaagcatatgaccgcctatcaaaacctggtctactattgcaaggctcgccatattcccaatcccgaccaggtcatcaaagaaaccttgaactatgttggcctgaataatacgggtaagaagaaattccgtgatttttcactcgggatgaaacaacggttgggaattgcgattgctctcattgctaagccagatttccttattctggacgaacccatcaatggccttgatccagtcggaatcaaggaattccgtcagatgatcaaacgcctcaatgatgaactcggcatgaccatcctcatttccagtcacatcctctccgaactctatctggttgccaatcgctttggcattgtcgaccaaggacgcctgatcaaagaaattagcaaggctgaattcgaagaacaaggagaagactacatcatcctcaagacaagtcagctagcccttgcgagtcaactgatccaggatcaactccatcaccgcatcaaggtcatcgataaggatggagaaatccatatcttcggacagactcacgatattaaagtcattgtcaaagccctcgttcaagccgatattgacgtggacgaaatctactatgcccgccaagatctggaaaaattctttacggacttggtagactagtccaatcaccgtcttcctctattacctatcccacatatttcatttaggagatttatcatgttgcataccattcaagcagatttttacagactttttcgctccaaaggtttttggattacagaagccattctcgttctcaacatcctgtctggagtcatctttggagctactggccacgtcggcgtcaatacggaatccaaattgccccaagcgaccgaagtttggacaggctttaaagctttgaccaactactcttccagcatcagtgtgactatcctctttaccattattgtcatcaccttggtcctgggaacagacttaacgcaaaacttatacaagaatagtctggcctatggcgtttcgcgcaccagttactactttgccaaaagcgccgttgttctgaccattgctctcttccaatttcttgtttcttatggtctcgtcttcttgatcgcgacgctctacaatggacttggcaccatgccagagcacttccttgctcattttggactgaccgtgctgattcagttcctttccaccttggcttgggtcagcatcatttccttccttctttatgccagccaatccatcaccttggccttcgttggctacttcattggaaatatcctcttaagccttcctgcgctcttccttaaagatattgatattctccactatctaaacttggaattccaatattccatggtacagagcacaacagcaacaaccaacaccctctcgatcgcccttggattcatccttgttttcggattcttgggactcgctacttttaaacacaaagatttataacaaaaatgcttgagcggtgctcaagcattttttcttagtgtaatggtcaaaacaaaccagtctgcttccgtcgccagttgcaagtcgccgcctaagatctctacaaaattttgaataatgtagagacccaagccagaagactcttctgtatccgacagattttcagagtagaatcgactagccagttggtctaaatgttggatcggttgttgcacaatattgcgcaattcgacccgaatcgtgtccgcgtccgacatcaaggtcaaacgcgcctgctcctttccatgtttgaggacattgctgagcatattttgcaagaggcgctcccaaagctcaggatcggtcgcataatgaagatgctcttctagctccacctctaaggcaatccccgcctcagtcaagctatcataatactggaacaactgctgggttaagacttgactgagattaacgtttgaaatccgaggctgaatagctccctccatcaagcgtctgtattccaagagagattccaaacgttttgagacgacttgaagattggaagcaattttcttcagcttctcctcttcctgcgtcccacccttaatgatttgttgggtatagcccgacgcaatggtcaaaggtgtccgaatatcgtgagcaatattactgatggccatatccaaggtctttttctcttgaaaggcaatccgattggtccgctcgatctgatcaaagagatcactgacctgcttggtcaaggcgaccaattctttttttgagagctgagaggtcagccgtaccccacttccgctttgaagtttcttttgaatctgctcctgcaaatcctttaaggcagaaagcaagcgagcatagcccaaacccaagagaaggacaaggacgacaagaattagaactaaaacccacattacttgtctcctttcaagcgaacacccaagccccagaccgtttcaatatagtcctcatctggatcaagctgggcaattttctttcggagattgcttaattgagcattgagggtattgtctccaggcagataaacttcttcccagaccgcctcatacaattcttctttggtgaaaatcttctttggatgtgacagcaaggtctcaaaaatttgaaattcttttttgcccaagcgaagcgtctgttctccggactccaattcaaaggtttctggatttaagaccaaattcttaaaggatagcttttgcgacgattgagcttcctgtgctaccgtcggttgatttctcaactgcaccgtcacccgagccgccacttcgtccagattaaagggcttgacaatataatcattggcacctgcaaggagatactggctaatgaggtgtttatctcccagagcggtcatcatgataaccggtgtttgactctgcaaacggatctcctccaggacctgatccccattcttccctggaagcatgatatccagaaggaccaaatcaacagcttcttgctggaagagtcgcagcccttctgtaccggaaaaagcctgaaggacctcatggtcttcacttaagagactgtataaaatttcttggatatcattattatcctcgattaataaaatccgtgccacttgcctcgctccttttttcttttcttgtgaaatcagttctattcccctagcctatcaaataaagggaccttcgtcaatgaaaatctgataaaattctattgtccccaggtagatctgcatgttaggtcatcacaagatgaacttgacgatcctttctttcaaagggtataataggaccaatgacacaatagggagactcatctatgaaaaataatgctaaaactaaaatcagtcttgtatccatccttgtcatcctgggcgttgctgcaagaatgatgcgagtcatccaccgccagcaaatcagggagcaaaacagacaaaccatccaaacgactaaaaaggttgcagagtttcagaaaacactagacgaggaagaaacgaagaaacgcaacgaaaccttcaacaagatttataatgaatcccttgttcggacaaaatttgagaactggaaaaaagtcgatgaacttcatggtttgggacaaagaactgggcaattttatatctataactttgaaaaaaaagaagagattctcttagagaatacagatcaagcatttgttctacccattcgatacaagagcgataacatcacatttcaggctatctttgcccacaaggacggtcagtggcatatcctagagccagacggaagttcacagttgcaactaggagcagccaacgtttccgctgaatctaagtttgtcatcgagaataatgtcttagattacgaccagtaaatccgtaataacttggctaaactacatacaaaaagcttaggaccccagcttgaaattgggattctaagctttttcgtttataggagagagtcggccagcaagtaccgaaaacttttattcaacagaagccccattggtcgcaatgacttctttgtaccaatagaaggatttcttacgtgagcgctccaagcttcccttgccttcgttgtcccggtcaacatagataaaaccgtagcgcttcttcatttctcctgtcccggcagagaccaggtcaatacatccccaagttgtatagccccagaggacaacgccatcttcgttaatggcatcccgcatggccttgatgtgagcagccaggtagtcaatccggtagtcatcctcaatctccccgtcttcatttggggtatcaacagcgcctagtccattttctacaataaacaggggtttttgataacgatcccagatggtgttcagcgtaatgcggagaccaagagggtcaatctgccaaccccattctgaactttctaggtaggggttcttcagagaggcaaagatattgcccgctgttttctccctttcagctggatcccctgaagcgactcgactggcatagtaggagaaggaaataaagtccactgtatggtctttcaacaattgcaggtcctgctccgtcatctcaaccgtgattccctgacgctcccactctttcttggcatagttagggtattccccacgcgcttgcacatcgatgaagaaatagttcttgcggtcttcttctagaccagcccagacatctcgtggagcacaggtatgcggatagttttgccctgctgctagcatacagcccaccttattgttaggatcaatctcatgggctagcttggtagcaatggctgaagcgaccaattcatggtgagccgcctggtatttgacctgctcctcattctccccttcttcaaagcagagacctgctcccataaaaggcgcatgaaggatcatattgatctcattaaaggttagccagtagttgaccaagcccttgtagcgagtgaagagggtccggcagagtcgttcataacattccaacatcttacgactacgccaacctccatactcggtaatcaaatgcatgggacagtcaaagtgggtaatggtcaccaagggttcaatgccatacttgtggcactccttaaagaggtcttcatagaactgtagacctgcttcattcggctctagttcatctcctttagggaagatccgagaccaggcaatggacaaacgataggttttaaagcccatttccccaaagagcgcaatgtcttccttgtagcgatggtacatatcaatgccatctttagctggataaaaatagccttcttcaaagtcgaacatctttttctgacccgtaataatggcgtgacgatcaggcccaatcggcaccacatccacattagccaagccacggccgtcttcattataagctccctcacactggttagcagccgtcgcaccaccccaaaggaaaccatctggaaattgaagtttgtcggtcatctctctacctcacttgatttgatagttctattatacccttctctttccaaaaaatcctacaagatcctatgaaaaactgatactattctaagattgtttttgttcacgcgcaacacaaaaagaccggataactccgatctttttaagttccactccaagaacgtttaaattttttgataatagaattacctagttcatacgataaaaatcaatcactaaaccagctgggcctttaactaacaggctttcggttccccaatcggttacaactggaccgtttaaaacctgtataccaagctctttcaaccgtttgtagttctggtctacatcctcaacctcgatatgaagaatgattcctgactgaaagttttccaaaggaaccaaatgattttgagacaacatgagacagtgactgccaatcgtgaactgagcaaaaccgtcatcggcatagtctgccttcttatccaaaatacgctccaagctagcacaaacttgggtaacatctgaaacgataatatctaattgatttaaattcatttcttatcctccacaaaaagaccggattgctccgatctttttaagttctgctctaagaaaatcaaagaataaacaaggcatcgaaccgcagacagtactggaatacagcaaggtgaagataacgcagtttacatttgattttccacgagaggaattatttgattgcgcgtgattgcaatccttcttcttccaagaagaggcggaatggtacgagttcttctgcttcgtatttttccttgaaggctttgatcgcttcttctgagtgttgttttggatccaactcaagaacttctactggaagtggacggtgttgcgtgatgcgagcatcgatgacaactgtcttaccttctttgttcaatttaacagcttcagcaacgactgcgtcgatgtcttcgatacggtcaactgtaaatccaatagctccttgagcttcagcgattttcgcatagtcagcattagggaagtcacaaccaaacaaatgtttgtttgtgtcttcgtatttgtccttgatgaaggcatatttaccatttgagaagacaacgttgataactggaaggtcgtattgaacgtttgtgataacgtctgggtagcacatgttgaatgcaccgtcacccatgatgttccatacttggcgatctggattgtctttcttagcagcgataccaccaggaagggcaatacccattgtcgcaaagagtggagatgtacgccacatgttcttaggtgtcatgtgaaggtgacgagtagatgtttgagtagtgtcaccgacgtcgattgaatagatagcgtcttgatcagcatgtttgttgattgcattgtaaacttgatacaattgcaattcaccctcagttttaccttcgagtttgttcatgtaatcacgccagttttggttattcttaacgtttgcacgccaccatggagtagattcaactggattcactttatcaaggattgctttggctgcttgacctgcatcaccaagaattgaagcgtctagggcatgacgtttaccaagtttgtaagggtcgatatcgacttggatgaatttttcagtgttcttgaaggcttcgtaaacttcagcaaatgggaagtttgaaccaaggaaaagaacagtgtctgcttcaaagaccacttcgttggctggtttccaaccaacacggtatgcagaacctgtcaaaccttcgtagttccattcgaaggcctcgaagtttttaccagttgtaatgattggtgctttaattttacgagacaattcagtgatcacatcacccgcaccaactccaccgaaaccagcgtagatcactgggcgttcagcattgttcaagatttcaacagctttatcgatttccacttcgttcaaggcaggagcgataaagtgacgttcataagaacctgatccgtagtaagagttttcgtcgatttcttggaaaccaaagtttactggaatttcaacaacggctggaccttttttagaaacggcagcacggcaagcttcatcgattacttttggcaattgttctgcgtaagctacacgtttgttgtaaacagcgataccgttgtacattgggttttggttcaattcttggaaggcatccatgttcagctcgttgtttggacgtgatccaagaatggcaaggaatggagtgttatccatagctgcatcgtaaacaccgttgatcaagtgagtcgcaccaggtccacctgaaccaactgcaaccccgatagagccaccaaatttagcttgcataaccgctgcaagagcaccagtttcttcgtgacgaacttgcaagaaacggatatctttgtcttcagccaaagcgtccataagtgagctaagtgttccagatgggataccgtagatcgtatctacgccccatgttttcaatacattaagcattgctgcagatgcagtaattttcccttgagtcattctaactctcctttaattctattttgatcccttaaaatgcagcatagcgcttctacttcatctttgcgatcatctcgccttgaaaatgagttttttctgacttttctcatgaaaacgatttacaaaacgattacagtattaatttatcacaaagagattcacatgtataaggatctgctcagagatgctcaatccctattccataacagatgctctttttgagaaattttcacaaactatcctacaatagggtattttactataatttgatacctcctcttttccctcgtcgctctaggtaaaagagaaaaagagtgatacagaattctgtaccacttcttattttcgttaatctattttcgcaacattgagaagcagcgagctagtcaaaacagacacagaactaagggccatagcaagacctgctagttctggattgagggtcaatcccagtcctacaaagactccagcagcaattggaatcccaaggatattgtagatagaggcccagaagagattgagtaagatgcgacggaaggtcttttgactcatgtcaaaggcgcgcacaacgccaagcaaatcattttgcgtgagcacgatgccaccggactcgatcgcaatatccgttccagatcccatagcaattccgacatcggcgatcgaaagagctggagcatcattgatcccatctcccacaaaggctaccttactgctttcttgcagtttttggatggcgctagctttttcttgaggaaggacatcagcaatgacggtatcaatgcccacttgcttagcaatagcttgggccacccgttcattatcccctgttaacatgaccgttttcaagccccgttctttgagctttttgatcgcttcttttgagctggccttcggagcatcttgaatggcaatcaagccaatcacttgcccatccacagacaaactgatcactgttttggcctgctcttgcaactctaccatccgtttttcaagctccggatccatcaatgtcccgtcatgaagtttgccatttcccaaggtcaccaactgctggtcgatctgaccttggaccccttttccttcaatcgcttggaagttttccacaggggttagcaccaaacctttttcttctgctcgtgataagaccgcttgcgctaggggatgttctgaaaaagtttcaagactagcagccagtgtcaagacacgcgcttcatctcctacaacatcggttacaagtggttggccaatggtaatagtccctgtcttatcaaacacaacggtttgaatcttttgcacttcttgaagaactgttccatttttaatcagaacccccatcttggcactacggccggttccgaccatcagggcagtcggcgtcgccaaaccaagggcacaaggacaggcaataatgaggacagagactgcatagagcatggcctcttgaagcgacgcgcccagaagcacggaccaaacccagaaagtcgcaatggccaaaatcgtcaccactggaacaaagatacctgaaatcttatccgttaaatcttgaatgggagcacgactggattgggccattttgacaaagtccacaatttgagataagagggtctcactaccgactttttcagccttaaagagaatggtcccattgctgttgatagtggagccgataactgcatcaccaactgatttttccacaggcaagctttcacctgtcaccatcgactcatcaatggtcgtacttccttctacaatcgtcccatcaaccgcaatcttttccccaggacggacccgaatcaagtcatcaatttggatatcttctgccgccacctcgacatagttcccatcacggagaacttgagccgtttttgcctgcaaatccaacaacttttccacagcctcggaggcattgttacgcatccgttcttcaaagatttgccctaagaggataaagaagatgataaaacccgcagcctcaaagtatactggctgaccagtaaaaagggcaaatacactatagacataggctaccagggttccaagagctaccaaggtatccatattggaatggtgcttcttaaatgaggcccaggcactcttgataaaaggaactcctgccactagcataatcggcgttgtcgctagaaaagtcccccagcgactgactggatgggatacaaatcctgccatcatcccgatcatcaagatcaataagggaagggtaaagatactagtaatccaaaagcgacccagtaaacctaagacacgacggcgtttttccacaaccgtgtaggaacccttttgcatcttcattccacatgaaaactcgaagtcccctgtttctgtcggggtaaaagatatgaccttatccacaccgacttccaaaggctctaaaatcccctgatcttcaaacaaaatttccttgtaacagccggaaggattgacccgatggaaggtgatttcagcagggatccctttttgaagttgaaattcctttggactatagcctttttctgctgtaatacggatcttttgcactccgttttccacaactgctttttgtttttctaccatacctactcctttattccacaatcatgtgaccatgcatcatgttcattccacatgaatacccatattcgcccgctttttctggcgtaatttcaatgacatgtttttcacctaaaggcaaatcttcatgaacgccaaaatctggaaagatcacttgagccagacatgaagatggatccttgcgattaaagatgatccgggctggaacattctttttcaggacaatggtttcaggcgaatagccccccataacttcgacttcaatttcttgataacctgatttctgacgagcgtggccgcttaccttttcatgttctgcaaagaaccaccaagcaataaaagcaaccccaagtaaacaaacaatactaattaacaatccaaacattaaaattccttctttctattacatacaattgcaagggactgtttcgacagcctcagctttcttatcttcgaggacttgttgtagctgattaagatctgctagcgtaaagtcactcgcctgaatcaagttttcaagcacctggacaatcctttttgagcaaaccttgtctttcacatcctcaaccaccaagtctatactttggtcctgcgtcaacagagccgagtagacaaaggctttgccagatttttctctagtcaagcaccccttttcaaccaagcgcgtcaagagggttttgatcgtcgacttggaccagtcaaagcgctcggacaagacggcgatcaaatccgtgctggtctgcttgccttccatccagataatcttcatgatgcgccattccgcattggaaatttgcatggcttctcctttctaaatctacatttgtaaatcttatgacgctattttacacctaagatttacatttgtcaaccaaaagttttaaaaaaaacaaatcttcctttgaagatttgtctgattgggcttttttcactccctatttttatctctatactatctcctgcagagcttgggctaggatgcgatacccggccacacttagatggaggccatctatcgtataggcttctgctaactgccccacttcatccaataaagacgaatacacatcgacatagctgacctggtggtaggcttgggccaattcttgataggcctgattgagggcttgaattttttcattggtccgcacatagaccttttgtttgtagcgctcttcttgactcaccggtagaaccgagatcaggttgatgtgggtcagaggaaaatccctcatgatcgcttgtaagaccgcttctacattgtccaaggtttccttttgagggatttcttttccgatatcattggtcccgatcaagagaaagatctgatccaccgccgttccaaaaacatgggcgtctagatgctgacgaaggagatccgtcttatagcctcgtactcctcgattgaccatgtgttttggactttgtaatagttcatgaatggggaaatactctacgatagagtccccgacaaagatcaaaccaggctccttcagaggctcttgattgagctcccgataggttgttatgactttctcctgctcctttaagagccagtcttctaacagttgtaccgccatctacttctttcctttcacttgttcccagggggtcaatcctagatactcttcgatcacttggtagacaccgccttcttgatggctcggtgctaggtgtttggcaacagccttgacagcttcttctgcattagccaccgcataggagtgagcagccatttcaagcatttcgatgtcgtttccactatccccaaaggccatgacctgactagcatcaagctgccatttctccattaattgagccagtccccaagccttgtgaatacctgcttgtaagagatccatgctcccaaaaccgctcgaaaccgccatgagctgatctccaaaagcctgttggacttcctgactcacttgatcaagacgatccaagccaaccaccaagctcattttaagcacctggtcaaacaaatcggctgtcaattccggaacaaacttcattcgcttgtacaaggcttcaatcacttccggctgcatgaatttctcaacctctgtaaagaccgttccttccttgacaaagccaccattgacagctgagacaaccagctggtctgaaatttcccgccccttaaaataagcaagaaccgcctctactagttctcgatcccagaatttcccaagaatcatctggtcatcctcaaaaatccgtgctccattggctacgaccagagtcacccgcttgaccaaaggacccaagagctggcgcatgcgatggatttcatttcccgtcgcaatgacaaagcgaatccctttttgatccaagtggtccaatagcctttccagacgcggaagatccatctctcctcgctcatctaataaggttccatccatatctgtagcaatcaacttaatcatacaatctaaccttttccctttcaaagggtgtaaattatctggttccattataccacagatcaagcaagtcaaaaccacccgtgaaaacaggtggcttcctcttgggctgaaggttgttactgatggccaaaggatcttataaatacaagcccttttctacactttcctgaaccaactcttctgtcagtttccacaactctttggactcactttttataaaatttttcttttctaataccatctctgaacggatatgatcaggattataattgacttctgacacttccaagtgattgatcagtggtaccaatgcgtcaatcactcttgcatatcttgcctcaggactctgccctttttcaaactccaaccacgattttttcatattcaaatatgttgcttctggaaggaggctcattgttttttctatagattctagctctctatcatgagcatgaagctttttttcatcatcaaacacccaagtatctccagcataaatctcacctaaatcatggatcagtaacagaaacatgaccttttccatattcaatttttcaggataataatcctgaagaaccatcgcagctatcgcaccctgccaggaatgctcggcactattttcaaaccgtccatcaagggttctattaaaccttgttactgactttaatttctcgatttctttaataaatgcaactgtctgattcaaatcactcatggcgactccaacctccctattcgaaattacgactatcataccagaaatcagggtttccataaatgaattcccatatttgcaaaaagaaaatatccccctttttgggagtaccttcatttttctaacaagactacaaggacaagcaaaaaagctaacctatatttgccggttagcttctatttttcacccaacaaaggcccaaataatagcaatcagcactgctggcaggagattggcaaccttgattcgtttgccccagatgaggttgatccccacacaaagaataaggctggagccaaccagtgagagattggacagggcttgtggggtcatgattggtgcgatcaaatgagccaaaagtgtgatcaagccctgaaggatcacgagtggtactaccgcaaagatcgcaccctttcctttcgaaactgtcaaaactaaaacgatgaccatatccagaatagccttagccaacaaggtcgaagtgtcacctgtcaagccatcctggacagctccgaccaccgccatagctccgatacagatggtcagggccgtggtcataaaggcatcgacaaagctggtatcaccttgattgcccgtcttttccttcagccatgtcccgaggtgctccaagccctcttcaatcttcaaaagctctccaagcaccgtcccaagcactagactcagaatcaacatcatactgccgtgactttccacatgacttccatgcaccaccagcatcttttccaaggtccccgcgatgcccaagacaaagacagcaactcctgtcactttcagaagagtctcatgaaaatcttctgataaacgttgaccaatgagcagtcctaaaagcccaccaaatacgacccctaaggcattatagagggtccctaaaccgatcatttacaaactccttcgttcattttcattctttttcaatttctttcaaagaccagcgtcccttctcttcatactggtcaatcaagtccttggctgtttgcgtgatctcctctggataatgtaggctttctagggtattgaccgcatttttggtcacggctgaccctggcttgatctggtagtcaaagacaatcttgccctccacatagcggctatcaaaatggtaattgtcattgacctcaccagaggctgcgaccagctcaatatcatggctggaaatcatgtagaggcagttttgggtagctaaccagcggacaatcccaagacctgatccgatccgctcgatggtattggtccccttaaagagctcgtcaataaagaagtagtgaaagccaggcttcttcagatgctgaatcatacgtaaaatagctttactttcagtgatgaagtaactatctccaacttcaatgtcatcgctcacatccatagccgttagcacatgaccatagggaagggctaatttttctccataggcaaagcctaacccttgagccagaatggcattgatggcgacagttttcaggtaggtcgatttcccggaggcattgtccccactgatgaccatatttttctgaaaatgcacatcattcgcaatcggattggacagcaagggatggtagagcgtctcaccttcaatcccacccgtctctgtaaagactggctgacagaccacttctagatcccgcttgtggcgcaagaggctaatagcgacttccatctctccaaggagatccagaagtttctgggcctctttttgatgagccttcacctgattgtaaatataaacctgagcgatctgcgggagtaaaaagagaacgttgaggtagaggagaataatttccatctcagaggtccccgttggactctgtaagacactggcaaggatccgcgttttcttaaagggtttgaccgcttgcttcagttcttcttgttgtggcaaggccagatggctcaagcgttctgccgaagcaaagatgcgaaccagatagctgacattgtccaaacgaattttattggaccaattgcgcaaactcgaaaagacaatattaaagaccacactgataaccaagagggtaatggcaccgactggctcaaaggggatggcaaagagacagacaatgggaaggcaggccaaggctagatagaggggcaaacctgcataatgcttgccgggatttgcgacaatgctccgcgccatgttgtggttcttcttgcccagttggttgaaaatgacctggaccttgaggcgcaaatcaggatgctcttcaaagaaggcttctaaatcatgaagctggttctgaggctggaattccagcaggcgcattttttgatagagagcctctgctccaaggctcgattgggtatagttgagctgatcaaagaccgcatccaaagccaaatcatgccaggtctgatcatccacttggctatcgatcgtccttcccttagctggataagtcagactatctatcaaactttcttctgtgtctttcttgcgaaagaaaggcgccccatcccaagccttcttcagcttttgcttgaggcggatggctgtaagaaatttggttgcccaaatcaccactatcaatcctaggatcccaagcgggatccagttcacatttccttccatgctctattcctttccactctgaggccagtccaagtgaacatgttccttcatttctcggtaggccgtgtccactctctccttggtctcctcatccagcttgtcgcggtatttgccaccctggataaaatcttccaaaatataggtctggtacttgtacaagtcatagccttcaggagaataggttcctttcggagtccgactgacccaggttggatgagcagtagccgtcttaatccgtgtcttgcgaccaaccttttcgatggtcacatccatcaagacccctcgctctgtccattgggcagtctccacatcccccatcgtttccagacgctgattggaaaggaaattccccatcgagtagatgatgagcttgttttgaccatctttattgaccacttcagcaggctctacaacatggggatgcccgccaaagacgatatcagctccccaagaaaccatcttgtgatagagctctttttgctcttctgtcggctccaactggtactcgattcccatctgaggcatgacaatagtaatatctgcctcttgctctgccttttggatctccgccttcatccgctcttcatccagatcagacaaaacatctgcttgctcttctggagtaagggtcgtttccattccattaaaaccgtaagcgtaggctagaatagcaatcttgatgccattcacttccttgatcactaagggggcctggcctctcttttcatgcgtgtaaacaccgacaggggtgatgcctgcatcttcaaaggccttggctgtcgaatagaccccttctaggcctgaatccaggatgtggttgtgtcccaaatccatgacatcataaccagcatccttgatggctggtacgacttcgctcggcgcattaaagaggggataacctgacaaatagtaattggggtcaatggttccctcaaaatcgcccaagaccagatccgccttttgtagccagggtttgacatacacataattttcatgaaaatcatagcttccatcttctttttgcgcgctcatataaagcaaatcatggtagagctggtctccattagccatgatccgcgctgtatgaggaatctgatcagccggtgtttttgccttgtacacaacctctggccgttcggttgcggtaatcggaaagccttgaaacttttgcacccacaagatggcattggccacgatgaaaacaacagacaagagcacatagacaaactgttcattggtcagccgaatctttgaaaagagacgatcaaaaacccagtcaaaggctgccgatagctcttttcccatcgttttgatggtccctttcacattctcccacttctctaacattcctaccccttcttcgtatctaatttctccaatgatccgccaacagattgagctgtcattgaaatactttctcttcattgtatcacaaattttaagaggagaaaaaaagttctgcaaaacagaacttttaaatgatttactacttgaaacaatagctacgtcacaccaaaaaatgccagtagatataattgtagacgaagatccaaattggtttccagtaaggtaaaaagttgtaaaaagcatgcaaaatgataaccaatcgtagatccctgtgttttttataaactgctgctatgaacaccccaaaaataaaataatcggtcaacataatcggatctcgaaatcgataaacaaaatgagcagcagaaaacaagaaagcggataacagaatatcgaagtgaaatcgattatttttaaagaaacaattcattaaataggaacgataaaataattcctcactgattggagcgataatgatggatactgcaaaatccaatattattgaaatacccagcccctttaaataaaccgaatccggtagcttgatcagaacagtttctggtgcaaaaacaatctggtcctgaaatgtagttataacccacttcgacaccatactatataaaataaccagaaggaaataaaacagataagaccatttccacttcgagccataaaaacttacgagaatccctttctttttcatccataaaacaagaacaaggatcaacaaaatacgaagagccatttgaatacaaataaagagagaggcactcccattaaataaggttgtaataccaactgccgcgagttctaaaacaaatagatcaaaaaattcaaaaagagtgatcgacaatatagccttcaaaaattttgtcatgtcctcacctcatgcatctaagatgttaaattataaagctttcttaatcccactattttataaagcaatctttattatagcacagctcacctgtcttgagaacacttcatttttgtttcttttatcaaaattatagaatagaaaaaagagtcttcctccccttataatgcagatgaacttttttacataaactatccttagtaaaccgccggaaaacatcattacgattttcaactgatgcaagcatctactgaaactttccgctgtgagaaaagtgcctgaaacagtgatgtttcaggcactcgggagttttgaaactttaggttcaaaactaagtcatggaacttcttggattgctgaaatcatccactggataatttcacctgacgtccgtactcacctaaggaaagtttctaagatgctttttctattatctcaatgcttttaacaaataaccatagccttcttgctccatttcctcttttggaataaagcgtagcgaggccgaattgatacaatagcgaagacctccttggtcttttggtccatcggtgaagacatgtcctagatgggcattgcctgagcgggaacgaacttcgatccgctccattccgtggctatggtcctggtaatagtggaccacatctttggcaatgggacgggagaaacttggccagccacagccagatgcaaacttatccttggcaaaaaagagtggctccccagtcgtaatatccacatagatgccctcttcaaaggtctgatcataggcattgtggaaaggacgttccgtcgcactttcttgagtgacttggtactgttctgctgtcagtttcgcttttaaggtttcttgatctggcttctgataagctgccggatcaatcaagggctgctcagcatctgtcacatcgatatggcaatagcctccaggattcttcttaaggtagtcttggtggtaatcctcagctaggatgtagtgacgcaaaggctctaactcaaccgctattttactgcccagttgcttctcttcttccgcaaacaggtaggcgatcacttcacgatctgcctcgtctaggtaatagacaccggtccgatattggcgtcctcgatcatttccctgcttgttaatagacaagggatcgatcacacggaaatagtagagcagaatcgatcgtagggtaattttatctggatcgtagatgacctgaacggtctctgcgtgatccgtttccttgatcagttggtagttggtcgtttctacctggccattggcatagcctaccgtcgtctcttctacaccggggatccgtgaaaaatattcctctaagccccaaaaacagccacctgctagataaatctctgccatcttttttcctcgcttcctgcattccccacagggaacgcttgacatctattagctccatcataatccaagagcctcagattttcaaggattctgcatcaaaaatcccttctactatatgtaaaagggggtcaatccttcttatttttcaaataagaaaaagagcgagtaataaaagttccaaaacgatagggttaactgatgtagaaaatcatgaaggactaccatgaccaacacctcctctgaatatctgtggacaaactcaaggcacatcaactacaaaaccaccgtcggtccatagacctgtaactgaggcttcacaacctcgtaatgccagtgatcataagctcgccaagcttgaaaggcctcttcgttcaaaactagcccacccagaccaatcaataaactggcggtctgataaaacttttctaactcaatcaacagacgattgtcaacccgcctagcctttcgtaaacctttcaacatctgatctagattttctcgaaatcgaagggcatctggactgggggggaatcctttagaaaaggctgtttgaagaaggatgatcgtcgtccttgcctcttgaatcacgtccctttcttccatataaatcaccttccttttcacctccattgtacacctttttctctctataaaaatggataattcctaaaactaggaacagaatgaggttggtacaaaagtcctagcctctcaattatttttggattgtcgagcaagacgcagtggttgagtgggctctactacgctgatttcatcagcttttacagccctactcaactgtgcggaggtgggacgacgaaattgaattctaacgaattaccgatttctgtcccactctcataaaaaacttccccaagtttccacttgaggaagttcttttcgaaagattagtcaatgtagtgcaatttcccacggaagtcttccaggctttggtagcctttttcttccatgatggctttgagctccgcagtgatgcggtcaaaagctcctactccttctttatggagtgtcgttccaatttgcaccatactagccccacaaagaatatgctcaaaagcatcgcgaccagtcaagacgcccccggtccccacaatctgaatttctggattcagacgttggtaaaaggcatggacattggcgagagccgttggtttgatgtattctccaccaatcccaccaaaaccgttcttaggacgaatcaccacggattcatcctcaatgtagaggccatttccgattgagttgacgcaattgacaaacttgagcgggtatttgttaaagatcgctgctgcttgatcaaaatgaacgatatcaaaataaggtggcaatttgatgcctagaggtttggtgaaataggcaaagacctcagacaagatccgatctgtcgtatcaaaatcataggcgatctgaggtttcccagggacattgggacaagataagttcaactctgtcaagcctttaaagtcactatcttgcacctttttcaagatggtatgagtttcttcaggagacatgccgacgagagataagaagaaggtccgatctggatccgtttcttgcaactccaataagtaattcaaataatagttcaacccttggttaggtagccccatcgaattgatcgaaccaagcggcacatcttggtagcgtggctctggattaccagcacggaattctaaggtcgctgtcttggtcacaaaggttcccgcagctgagttcttcacttcttctaattcctcagttgtcatacaggctacacctgccgcattcatcaagcagttgtcaaattcaaaaccagcaatttgcgtctttgtcgataccatcttgtactccttttttgaaacaccaccaacagaattgttcgggatgctctctattttcttctttcattataccatcacttggaagcttccggacaatcaaagctaaaaattcttccaaatattcggactttcctagtcacgataaaattttcagaaaattcaacttttttctttacaagccaaaaaaagtctgctataatgatccatgtaataaaacatgacattgtttgtcaactgtctcaaagccactcccctagcgggtttgctggttttcgtttcattcacaaaggagaattaacatgacaactgctaaagaatatatccaaagcactttcgaaactgtaaaagctcgtaacggccacgaagctgaattccttcaagctgttgaagagttcctcagcactttggaacctgtttttgaaaaacatcctgaatacatcgaagaaaacattttggctcgtattacagaacctgaacgcgtgatttccttccgtgttccttgggttgaccgtgaaggaaacatccaagtaaaccgtggttaccgtgttcaattcaactctgctgtaggtccttacaaaggtggtcttcgtttccacccaactgttaaccaagggatcttgaaattcctcggtttcgaacaaatcttcaaaaacgtcttgactggtcttcctatcggtggtggtaaaggtggatctgacttcgatcctaaaggaaaaacagacgctgaagtaatgcgtttctgccaaagcttcatgactgaattgcaaaaacacatcggtccttctcttgatgttccagctggtgatatcggggttggtggacgtgaaatcggatacctttatggtcaatacaaacgccttcgccaatttgatgctggtgtcttgactggtaaacctcttggtttcggtggtagcttgatccgtccagaagcaactggttacggtttggtttactacactgaagaaatgctcaaggccaacggcgacagctttgctggtaagaaagtcgtgatctcaggttctggtaacgttgctcaatacgctcttcaaaaagcaactgaacttggtgcaactgttatctctgtatctgactcaaacggttacgtgatcgacgaaaacggtattgacttcgaccttcttacagacgtcaaagaaaaacgtcgtgcacgtttgactgaatacgctgctgaaaaaccaactgctacttactacgaaggttctgtatggacttatgctggtaactatgacatcgctcttccatgtgcaactcaaaacgaaatcgatggcgatgctgcaaaacgtttggtcgctcaaggtgtgaaagttgtctctgaaggagcaaacatgccaagtaacatcgatgccatcaacgtatacaaagaaaatggtatcctttacggacctgctaaagcagccaatgctggtggggttgctgtatctgctcttgaaatgagccaaaacagccaacgtctttcatggacacgcgaagaagtggacggacgtttgaaagacatcatgaccaacatcttcaacactgctaaaacaactgcagaaacttacggtcttggtaaagattaccttgcaggtgccaacatcgctgcctttgaaaatgtcgcaaatgcgatgattgcacaaggtcttgtataatcaatcgatatttttctttgagaccttcgggtcaaagcctctcaactcctgaaaccagtatgtttcaggagttttttttgtagttacagacctctgtcaagacaccccgtcccaagtgaggaaagccattttttagataagggactcgaccgtctctagtggggagaagtgatccctctctttttctgtatctttttctaaaaaaattttattttttttactttacccccttgcatttttaataaattagtattaaactatagcaaaaggaggtgtgcttatgtttcttttagctcaagaaaaatcagatacgatcgaattccttaagtctgaattggtccaattactctacaatatgcgacaagaaatcgcagctagccgtcaatcacagaccggcgcagcttgtcatcatattgaatattgcatggacaagatccaaagggcaaaaagttccgtagccattgccctcccgatcgaatccttaaatcttgaaatcacgactatgttgcgccagcaactcatcgtcttgccaccagaggctcgaaaaaattgggaccagattaaaaagctggatttcaaatactgccacttaaaatagaccaaaaaagagagtgggacagaaatcggtaattcgttagaattcgatttcgtcgtcccacctccgcacagttgagtagggctgtaaaagctgatgaaatcagcgtagtagagcccactcaaccactgcgtcttgctcgacaatccaaaaataattgagaggctaggacttttgtcccagcctcttttttgtgttaaacaaagtataaatttctaattatctttttatattttcttaaatgctcgtaaagccttattctatgtgctttcgagtatttttactgtaggaagatacttcacgtttctttgcatatttcctcatgtcttagctgtcagaagtggtaaataagtagtaaattcatttgtactactaagcaacaagacgctcctgttgcttctctttattcaagcgtttcatttctgccattgcagaatcgaatgttgcatgtgcgtaatagttcagcgtcatggctatattagcatgtcccataatgtactgtaatgcctttggattcattcctgcatttgcatagttggtacagaatgtatgtcgcaaactatgtggagtgatgtgtggcaatttatcctcgttatacttattgtatttcttaacaagacctttcatcatgccgttgtaatcacttgccacttttggatagttctttctattaagaaagaggaaatcactatatccatcaatctcaacacgcttatcattctttcgattcgctaacactcgcttaaatgcttgataggcttcttcaaccataggaacttgacgttcgccacttttggtctttggtgtttcaatgtagtacccaatttcagtatctctcaatagctgatggtctatattgacaagacgattctcaaaatctaaatctggaagtgtcaaaccaccaaactctgaaatacgaagacctgtttttaagagtatcagaatttcatcataatttttgctgtaggttttatcagcttttgcaaaggctaacagtttttcttcctgttcttctgttagtacggtcttagggacagtatcatcatcaagaactgctttcagttgaaagtcaaatggattcttccgaacacaatcatcttgtatagcaatatagaatgaagcctttaaagaacgtttgtagttattgatggtttgataagcataaccattttcactcattctaatagcccattctttagcgtctgatggcttaatactgtcaatacttcttacacctaacttgtctttcttcaaaatatccataagatatttgcgtccagtttcagtgttttttctaacctttggtctttgagcgttctgttttgcgtaaagctggcagagtgtcattttctttcctacaacatcaataccatcatgaatgtctttctgtaactctgcgattttctctctaagtgagatacaatcacgctttcctgctggtactcggtctgtagccacaagtttccacgagtaaacaaattgcggttctccaaatgaatctatatatttgtataagtatcttccgtcttttcgttggctctctccagtctttaagattcgacctttattgtcacgtcttttttctgacatggcatttgctcctttcctttatggaaagagccttgatacgacttaatactattttatcatatacaagaccctttggcgacgctagattgcgtccaatgtatctataattttttcaaattgttttcgtttaatctgaatacgattgccattcataatcagccaatttgcatttttattttcctctgccaagcgtcgtagcttgttttcgccaatacgaaaatattttgacgcttcttcaatggttagggtataacgttcccaaataggaatgtcagtctgcttcataaaatcctcctttccaaatcacttatttggatttcataaaagttgttttaccagcaatcgaacagctttagcaaagctcacgggagttccacccctgcatggttctcatgtagccatactcattgcctgcgacggttttatcacgctcggactattgactgtatgggagtatcattatcacgataagaatgtcgttgcaggcaatcctgctaaagattgcttctcggatcactaacatgaatcgctcgctatctttataagataggtcatggcggttagttccgttggctcttttcttatcgaaacgtattcgattacttttattcagttttcaaagaacaatggctcgttagcctatcaaaacacattgaaagctcaatatgctttggtggaataacaaacctccctgttcgggaagcgtggaatggtttagcacgcttccacgaaaggagagaggatattacttaatttcaaatgacaaaatctttgtaatcagtctggtttccattcttccacgtaagacttcatcaacgaccatactttgattgccatattcatctttcataagtcgtagggaacgcttcgttatgtaccctctgtaatgatgtagaatctggttaatcgcttcggtatcgccatctgttgcctttacaatgagaggaaagggaatcataggatattgtgttttcattcttcaaattcctccataaactttttaattaaggctagtccactggttctatgccgatagacagtagaacggttcaatttcaacaggtctgcaatttctgaatcgctcatgtccataaagtaaaacagcagtagaatttcacgtttcttgtctggcaactcacgtaatgcttcactcaacaaatcattttcaacgcctactgataacccattgagtgtaaaaatctgaaagtcagttgaatagttatctgttgtcgcaaactggctaacaagataatcgccaacatccgaaaaggacacctcacgctttgcaatccttgaaagataaagcatataattctttcgctcgtcttccatagcacgtttacagatatagtcaaactgattttctattgtggtctgaaaagaagatggtttcatgtttctcaccccctttctgtctaggaaaggaagtgagccttgctcgtttatctcctttcactcttagtcccaatgtgaaagggggatttgttgcattactgataaataaactttgtaaaaaagttctgaatagccaaaaaagcatataaacagatttatttctctgtttacatgcttctgttattctatctatatgatttataaaaccacattggtggacgtacttatctattgcagatagacgactttttttgacaagaacccaatgtaaggaaatttattgtatatgatgtacttcatggcgacgttgacctccaacaaaccgccatttggaagtaatatacaatattttaacagcgtaaatagcactaccatataacggttttttttattggcgtttagtagtgctttttattaaatataaacctataaaccatataacacgtttttctatacctgtttttaattcagtaggaacaataaaatgtatagaggtggtctactatgcgtaaaaaagaagataaatatgattttagagcctttggtttagccattaaagaagctcgattgaaacgaggtttaactcgtgaacaagtgggagcattgattgaaattgacccacggtacttaactaatattgaaaataaagggcaacaccccagcatacaagttctttatgaccttgtatcgttacttcatgtttccgttgatgaatttttcttacctggggtcccgagcgcttagtgggaatttgtatcgataaggggtacaaattcccactaaaccaatgtttcaaggcctatttattttttatattcaattctcttaagtgtttaggaatagataacaagtcaaatttatactctccaagaaaagtgatatgctcccaattaataggagatacatgcttcatatacttagttacttcgggatctattttgacgagataattataagctgcttgtaagtagacggcgttccatatacttattgcatttattaacacattaagcgcactagcactttgaagttgtcggcgaatatcgcgctccataaattttccgcgtcgcccaaaaaatagttctctagctaaagcattaatcgcttctgtcttatttagtccatgagtgatccttcgccgtagctcactatctgtaatataatctatcataaaaatgctcttttcaatgcgacctagttctctcagtgcaagagctactctattcttacgtgcgtatgagcctagctttcctaatagtaaagaactagatacttttcctgtttgaatcgaataggcgattcgtttaatttcatcatagttttcttcaataatttttacattgatttttccgcttatatcttctgataagttagggtagtaggaaggtgatttgatagaaaataattgtgatttttttatatttctgatgcgaggttcaaaatcaaagcctagtaatgcggtcattccaaacacctgatcagaatacccatttgtatcagtaaaatgttcctcaatatctagatctgtttcatgataaagtaggccatcaagggtatgagtagcttcccttgtattagttgaagcaacctcgatatgatgagtcgtatgcctatcatttattgatcgaatcattgtagctcctttttccatacttttgtaatgtggattaacatcggattttagagctgagacgcccactgggacgcgcattccgtctgaagcagtggtttttccttcaccccaaaagtctgcaacaggaagctttaactgataattaaccaaaacagattgagcacgagtcagagcttctttataaaagcgccattgtttggcattggctaactgagaataagaaattccaggagttgattgggccattttttcaagaccaatattcatccctaaacccagcaaagcagcaaaaataatttttctttcttgttcactcggcggtttccctgtagaatcatgactaaattcttgtgaaaagttggtccaactgtccacctcaattaaaagatcactaagccttatcttaggaattattgaataaagtttttttctatatatttctgcttcgctaggtgtaactttttccaactttttaaggtttgctcttgaaattctcttatcaactgtcgaataaaattgaagctgtaaatctaaaattatttcccgatcctttaaatagtcctcaaacgtgtctggaatagtttctgaatcaatacaagcagataaatcaactaagtaatcatcaatatttcgatggatcatacttccttcaactgaaatatctcctgatcgaatattgttctttagctcggtgaaagctactaactcatagtaagaccgatctattttcccctcttctggccgaacaaggcttttccattttttactcacaaaatcagtagaagtatctgccggtatttttcttttaccactattgtgtaaatcagttagttgagttagggccatgaggactggatttgctgccggagttgctttgaacgaaagggtcctcaataacattggcgtgtatcttcggaggtaattagctttatttcgaaccatttctaaatagccatgatttttattacctgtaatttttttagcttcttctccatcttgtactaaatcttcccaaggcatgattcgttcaatttcgtcaaaaggattactatcattatcttttgcaaagtgaagagcatcaattaaagaagcataatgttccaattttttagtagccaattttcctttttcttttaactgttcttgtgaatcacgtgtccctttgcgtttaatacttgctaaaatgcggtcattaatctcaatcagttgatcgatcagatattgatgatgattgactaaaaaagcaataagtaaagagtatcttttttcaagctcaaaacgggagaagtcatatgcatcataattttcccctagtctagctagctgaagaaacctgttccgattaatatgggagacattaattgtcccgagtcccatggaagcaatcacttccacttttttacaaatactcataaagctttctggatttgccttacctggaatgtcttttagccaagcgagtttagttattttcgtctcttcataaatttgaaacaaactctctagtttttcaatttgtatatctgttaatgaacagagtaatattgaaaataagttgttttctgctttatctcgacagcggcttataatgtcttcaagtgtagctatagatggaaaaataattctttttcgagttaagaaatcaattgtttttttcattagatagatagagtcatcattttctaaagctagttcaattaaatattctattaactgtttttgtgtattagcactaccgaatcgatgatagttgaatacttctaagatctcgttgaagtgatttgcacgtgtatttctatgatcatatgaatttaaatcaattgcatcaagatggagctgtcgactcacataagaagttagtctggttgatttaatcggccaattacttaaagaacacccaggataccgggccaaacaaagttgtatcgcaaatcctagtttattgacctttccacggtgttgattaataacctccagatcataatcagaaaaactaaaatacgctttaaaatcctcttctgataagtggtctacagaaagaagttgttcacgctgtgaagtagttaaaattcttttcatagccatatcttaagcattccttttattgaggtaacggtaaaaggttgttttgcttaatttagaggcatcaagaatttgacgaatagaatactctttgctgtcatacatttttaaagctaaatcaattgatagcttacctttacttggacggccccctttttttcctcggactctggctgccttaagaccagagttagttcgttcaataataatatcccgttccagttctgctaaactagccataactcggaaaaagaatcttcccatagacgttgaagtatctacgttatcttgaatagatataaaaatgacactaagttcttcaaataattcagaaagttcaatcaaatgtttagttgatcgtgaaattcgatctaacttgtaaatgacaacagaatctccttcacgtagtaggttgatcatttcttctaattgcggtcggtcttttttcgcaccagttactttttcttgaaataatttatcaattccataatgagtaagtgcatcaatttgtaaactaagattttgatcatccgtactcactcgagcatagccaaaaatcataaaaaaacctccttaattttataatttaaatgtaccataactcattaagtataactatataggaactatgaaaaaggaacggattttggtacttgatttacttaaaaaacatttagaaaaagcaggaaaatgaaaaggtaccataaacggtcgtttatggtaccattcaaatttatccttattgtacaaaataacagcgaaatttttaaatctattccttatcgatacaaattccccgtaggcgctagggacctctttagctccttggaagctgtcagtagtatacctaataatttatctacattccctttagtaacgtgtaactttccaaatttacaaaagcgactcatagaattatttcctcccgttaaataatagataactattaaaaatagacaatacttgctcataagtaacggtacttaaattgtttactttggcgtgtttcattgcttgatgaaactgatttttagtaaacagttgacgatattctcgattgacccattttgaaacaaagtacgtatatagcttccaatatttatctggaacatctgtggtatggcgggtaagttttattaagacactgtttacttttggtttaggatgaaagcattccgctggcagcttaagcaattgctgaatcgagacttgagtgtgcaagagcaaccctagtgttcggtgaatatccaaggtacgcttgtagaatccttcttcaacaatcagatagatgtcagacgcatggctttcaaaaaccacttttttaataatttgtgtgcttaaatggtaaggaatattcccaacaattttatacctctgtttgttagggaattgaaactgtagaatatcttggtgaattaaagtgacacgaatgttcagttttaatttttctgacgataagttgaatagatgactgtctaattcaatagacgttacctgtttacttattttagccagtttcgtcgttaaatgccctttacctgttccaatttcgtaaacggtatcggtttcttttaaattcaattgttttattatttggttgagtactttttcactcgttaaaaagttttgagaatattttatatttttgttcatgtaatcactcctgaagtgattacatctataaataaatacagaagttaaacgatttgtttgtaattttagttatctgtttaaaaagtcataagattagtcactggtaggaattaatctaacgtatttatttatctgcgtaatcactgtttttagtctgtttcaaaacagtagatgttttatctacattacgcatttggaataccaacatgacgaatccctccttcttaattacaaatttttagcatctaatttaacttcaattcctattatacaaaattttaagataatgcacaatcaacacactcttaagtttgcttctaagtcttatttccataactttagggttaaccatacgcaagaccaatcactctcggacaatactcatgattttaatgataaaatccatgttaaacccatagataagaaatacacctgcaataaccgttacctgtttgtgccaatttaaaaatgcaccacttttttataattaaaacggttgaaaactgtaccactaataactcacaatagagagatgtcaccgtcaagttaaatgtacaaaataacagcgaaatttttaaatctatttcttatcgatacaaattcctcgtaggcgctcgggacccctacctgctaataacttggtaaaaagcacccgacgattacagatagagaaatacatggatagctttacagacaaagaactatccttaatggaatctttagccagcggtatcaacgaagcaagaaacatcgaagactaattaaaagaatccatacataacggaaagagccgataaaatgagattgtattaatctcattttatcggctctgcgtctttgcgtctggctctgtaatcacagttactttgaactgctttatttcaattaaattttcttgtctgcatttcggacaatagagggggaatttttttaattcagtatcttcccttatctttaatcgtgttttatttccacatacaggacacaatatccacttgtagtttataataactatctcctcctttacactttaattcaaatctttattaaaaaatatttcatcttatttaacaagaaaccatatttatataacaacataaaatacactaagttattttattgaacatatatcgtactttatctatccgactatttggacgacggggctggcaaacaggttcaccggtagtaacatggtacccttttaactctgttaaacaaacactacgtccatttgtaaagaaagttaaatcactacgatattcttgaatacaccgagcagggatttctccactaagaatgacctcattatttttcaattgagtgtctacgatgttcgcacaatatttaggagcatcgttgtatgctcgtgaaagatattcctgtggcgcataaattttaaaactaagatatggctctaacaattctgttccagctttttttaagacttgttccaatacaataggagcaagcatccgaaaatctgctggagtactaacagggctatagtataaaccgtacttaaaacagattttacaatccgtcacattccaaccatataatccttgttcgcaaccatagcgtatcccttccataactgcattttgaaatgattgatttaagtatccaagagaaaccgagctctcatactgcattccacttcccaacggaagcggtgatacagataaaccaatggaagcccagaaaggatttggcggcacttcgatgtgaatggtatattctgcattttttaacggtctctccatataaatgactgtaggctcttttagttctatctccacatgatacttttcttgcaacagtgcactaatcacttccatttgtactttccctaagaaagaaagtataatttcatgtgtcgtagaatccacgtaatatcgtagaagcggatcactatctgagatttccaaaagggcatcaagcaacatttctctctgttcaggtttactcggttcaacagttgtttgtagtagagggtgcggattttcaatcttttttctctgtggcaatagttttgtatctccaagaacactatttaacttcaaaaactcattttgcaaaataacaatttctccagaataagctctatcaatcttacataattcaccatttattgaagtatacatttctgtaacttttattttttctttttctgatactctaaccgaatctcgtaaatgtagtactccactataaaggcgtatatatgcaagacgttgtcttttttttgtatattcaattttgaaaacatttccgcaaagttcagacggacctcgatgtgttgatgaataaaatttattagtaataacttctataaggttatcaatccctatattactttttgcacttccatgataaagagggaacagagaacaattctgaaatcttatgctttcctcttgttcgagttccaatgcttctaatgatttaccggacatatatttctctaaaaggtcatcgtttccctctattaccgtatcccattgttcagattcggtaaagttcgtcacacacatattaggatacagttctaccttctgtttgattacaatttcggcagaaagtttctctttaatatcctgataaaccgttgataaatcaattccattttggtcaatcttattgataaaaaagattgtgggaatccccattttcctaagtgcatgaaataatatacgagtttgtgcttgtacgccatcttttgcagaaatcagtagaattgccccatctaaaactgataatgaacgatatacttctgctaagaaatccatatgtcctggcgtgtctatgatgttcaccttcgtattttcccactgaaaagaggttattcctgtctgaattgtaattcctctctgacgttctaaaagcgtattatccgtcctcgttgtacctttgtccacgcttcctaattctgtaatcgctccactgttatataataagctttctgttaaggtagtttttcctgcatcaacatgagctaaaactccaatattaataattttcatgtgattttcctccattcaaaaacccaaaagggcataaaaatcccagtgataaatacttttatcactgggatttttatgcataaccataggtatacaaagcatacagatattctctggatactttagaatcacatgataaaggtattcttaaactgggtacaaaaaactaagccctcctaaaaaaggacatccaattatttgttcccactatcaaattgacagtttatttaagaataccttgccgcatatttattaactccttttaaatagatacttaaataatagcacgtaagagcatatttgtaaaggaatctccaattttttatcaaagagagtacgtgattacaaaatagctgtaataatgtaccaatatttgttattctataatcttccaattactcccgttcttttcaagtaccaaatcaaattgagatacctgcgttgctttggtctgctggtcgatatactccactgtcagcgataccgtgacttgattatccttacgattgtgaataggatttaccagttcttgaaagatgtactcttttccgattggttttaatatcccgtcattcacatagtaggaaagttcactggctgtcgctgtaggatagagcttgaagaacgtcgttaaaaactcattgatttcattggttgtaatggaatcaaccgtcccctcactttcaatggcttttggtttataacttgatttcttaggtatgttggtaatggtcggattcttaaccagtaccatatttccagaaccatctacatagacactcactatataagcagagtggacggtctttgtattttctccctctgtaatgagctggtctacactgtaggttacattaaactcattgtcgccagttggctctaccgtccatatctgaaatcctcttacagaagacgatacaggaatatctttgcgtactgtatcaacattgagagcttgaagttcatctgtcagatagccttttagactttccattcgattatcaatggacttatcggattgctcccatgaatagtagactttcgcaaagttctctacaaaattttctacatgatgagtatcaacgtattccttttctatgatagttgtttcgtgaatagtatgagtatctatagctgtaaagtgcttgaatatcgcaaagctgaaactaagccctaaaagtacccacaaggcaatcacaacctttttatgaggattgaccttatagtagacacgaggtttcttttcctttggtatctgtttttctttattctgattttttctaaatttcatcattaaatcttcctttctcattgtttgattcgtcctgctcccactaaatgctgttgccagtaggggcttgttaagtcggcataaccgattgggtcgcctgcatgaaacatacggttattgccaaggtatatcccaacatgagtaatataagagccagcgttataggtagaatgaaagaaaaccaaatcgccagcttgtgcttccgatagtgggatatgctgggtcacatcatattgctgttgtgcggttcgtggtaagttaattccagcttttccatacgtccattgtgtcagtccgctacaatcaaaagaagtagtcggggaagctccaccgtaaacgtatcgccagccctcatatttcagtgcttcgtccatgatggcttgtaccgtatcatcatcaaactctgttgtgacaagatactgcgttaccagttgcacataaaacatattgccatagttgtatcgccagcccccattgataggtatggctatgggattggggtaagacactttttcgccacctgaatactcttttgagaaactttgagccagttcaaaggtatatttatttccacgattagccacataccctaagaaaccaccaccataattgtaggactggataaccgattctaaatctacactgagcctttcgctactggctaataattcactgaaatacttcacaccttgcttaatggattcttctgtactcaatgaattaggtggaagaccgagggattccgaggactgcataacatcttccgcagtaccgcccgattccacctgtataatcgcaagaagtatgttgacatattcttcaacgccatattctttggcatatttttctaccataggcttatgagccagcacttctgcggaaacattcacacctccataatgaatattggaaattccgctgtcctgttcatctgaaaataaaatggcaacaaacagaagcagtgagaagaccatcaagaataatccagaaccaccaatcactaaagttttcaacttcatggtttcttaccgactttcttaatggtggcggttttgattggtggtctacttcttgtattttgtagtggtactctttgaacagtagacggacgttcttttgtgattggacgttgtgaagttctatctgctgtagtggttgaagttgctggcttttgaacggttttttcttgaacggtattgccttggcgttccacttttggacttgaaaaatcggacttaactgctggacgctcttgtttggcttgttgagattccttatatgaagtctgaatattagactgttttgaggtctgttcatcatgatattgttcttgtcttgtagtcggtctttcatgaacagaagaagcaggctgttttttctgtttgacctgttccatttcagagcgacgcttcgcaatggtttttcgcctttgttcctgctgttccttgcgtccactggctctgtccgctttggtttgagaaatactactggttaaatcacggacattctcttttactttggattttccttgatatactgcatatcttgcattggtcggcaaatctttaacctgttctttcaaaccactagcagtgtctaccattctgtctttggtatcagctactgtaccgatggtttgaccgatacgttttccaagtgttgatttttcctttccgtctggtcgggagtgatctgcttgtgtccttgcagaactccccgaacccgactgtccttttttacctgtaacaatggcagacccagcccctagagtagtcatggaacgtccaagtttccgctgtagacggtgcatgtgagcgtgcataagcatacgaggttttctcatcacacgacttcccacactttgagaatcgttactctgtagagaaaacatactcattaaatcgcccagcttgaagtagattcctgcaaaggtcacaatctgtagaaaagcaatcaaaaagaacggataaccagccgataaggtatagagcatggttgaaatactaaatgctgtcgtaataatcaatgtgattccagctcgtgtcaaaatggtattaaagagctttgttatggctcgttttgacataccatcaaatgatggaatcatgcttaaaataaagctcacaggcagaaacatagcatagatgataaaaagtacctgcgagaaaatcatgattcctgttaataggaatacaaatatggaaatcccaatattgaagacaaataggaagaagactgtacctaaacggttaatggtctttgtaatggttagattggtattgcttctgtcttcaatttcttccgcaacaattttttctctgtcttcgccattgttggaatctgggctggtggagagcaggctttccacacggtcaataccgatactttcaatgtctgaactgttgtattgaagcagtagccacggttgctgaacctgtatggaaaacaggctatctctgattaagtccacgctgtccttgccttgactatcggaatggggcatgacaatcttcgtgccaagtgataaactggcattactgatgtctgatgaaaagtcattgatttttttaatgtagtcgggagcgtaggcaataaaggaagccgataggataaacaccagcacaaaattcataatggcatgaattgcctttgtggtttctctctttatcagtcccgtataggcaacataaaccccaagaaccaaaatcaagagtaagaggaatccaacatagaaaccctctgttgaaaatccgtttgcactcacaccagctaaggtctgcatattcttaccaatggaatctgctgtagcggaaatgaagtctaaggaataggcttcctgtactaagtaacctgtcgcattggaaacatacaaactgattgtccaaataaaattggtaatggcatatagtccatacatgacctgttttccaatcccgtccgaccagttccacggaagccagccccagctattatccacataaaaatccagttgatagttttcaagtgggtatcggctgtattcatttgccacattgaccgtatcatctaccaagcccgcagcttgaaccaccgttcccagcatggctaaaagaaaaatggcaatcacaagtgtgaaagccactgtcattgccactttacctagacgtttcagcgtccagtttgattttattctgtttactattgatggtttcacatttacacctcttttcgcacaggtggtctggtatcaaaggcatggagcagttcttcaaatacagggtggaactgtatcacaccgacacgaccatataaatcactgataaggcattgcccgttttccaaatcacgcaatcgcttctgattgttttcgtcctctgggtctacaccaaaaaaggctaaggtctttttaatctcgttaaggtcagtggaacgaaatgcaaattttaagccgaggttatttttcagtttttcatctaagaggtcgtctgtattttgggtcacgaaatataccccagcgttcatagcacgaccagcccgaaccagcttcatagatagtgtttttccttgtgctacctgtaaaaagctccatgcttcgtctaaatctacaatcttgaaaatgcttcggtctgtatggataaagtctaaagcaaaggtactaatgacaatcagcatagcaacggataaaagctccatagtggtatattcctcaaaggaagtttccttgtcgggaagtaccaagtccgcaacctgtataatgttcagttgtttttctaagctgatagactgctccacataaccattactgaataataaatgtgcaaagtcatagtctgtaaaactttcgatatggtcggctatactggtacttagtggcgtattctcaacccgtaattcctcaatcactttcatcaaccctcgtacttcactattggttactgcacgaatggcttttctaaggattgggaagcgttccccatcacgagaggaaatccccgtaaggaatgtcagaatatcaatagccagtgattcagaatctttgggatttttcataatcacataagggtcaagtaagcctttgtttttctcatcagaagtcagagtgacgatattgatttcatgggaaatctctggcaaggtttctttccatctgccacgttctgcttttgggtctacaatcactgcttgtgccccataaagcaccgcataatagacgataaggttattcgcaaaggatttaccaccacccagcgaaccaacaaaagccgacgctaacgcattggttactgaacccttaaccccttgactggcaagagcaggtttcagatagacattgcgtccagtatctaagctgtagccaacataaatcccctcattttcccccagcatttgagtagcaccaaaacctaaaccagcgaggaaatcagaggtcacgtattgaatataatcattcatataacgcttgctggcaggtaaaaattcttcatgtaagccgagcatatccccaaatggtcgtaccagttttacgcttaaatcgtcataaaaatctttcacttcattacaacgacgtttgagttcgtcaagatcatttgctgatacccttaccacataagacagcttgtacatagattccttgctttggtctaaattggtttccagctcattcacactttccagagcttccgccacattggagctggtttcattatcactttgccaagcgtggttatccaagtctttcagttctttctttttattgcggacagtagatagggctttacgattcgctacaatttccacattcattgacgtatcaatcgggaatgtaaattgctgttgctggtagtagaagatttcagaggacgggaagtccagttctccgacaatgctgttaatggtaaagtaagctacatagacggtttcatcttcctgctggattttcaaatatcgctgtttttcttccaccaaacagcgagtaggcttaatcaagtcatagtatttaatcagcgtttcattatccagctttttctttgatagatggtactcatactcttcataggcagtgcctgtctgtccgtaaaggtgttcaatcagatagccgaagtcgtccttatctaacctgcggattttgaaacgacgagagattttattttctaagagcttttccatcttctgaaaacgcaggatttcatcattactcatactaacaaaatcgcccatcagcttatggttcacatcatagacaaaatcagacaaagcattttttgcttcaacggtaagacttttcatagaaaactcctgatcgttgagaagcaacttaaagccgataaagaaacggtagttcacttgattttcgccaatcatggatattaaagcgtctgtctgttggtcgattttgtcataggcaaccgctttgagcttgccagtgacttcatttttggaacgctcttgtgcagaacgtatgctggattctgtactgatttgtaaagcatgaattttgccatcacgattttgtgcgataagctgtctgaaagaatcatgcacttgtattttctgttctggacttagaaatgagtaattgtaaggaacaagctcatagtaagcataacattccccgtctttattccagacgagattgttttcaatgtatttaattggatatgccataaaattcactcctaactgctgtaatggcttcttgtggctggtttctgccaagcgttactttttttcctgcataggtcagctttggtcgcagtgcataagcaatgacagacttcaaaaatccataaggctttttaccatcaaaagtttttgtagacataaaccatgtgaaagccacaggaatcccaaagtatttgagaaatgctccctctatcatggaaagagggggcaagttgccaagtatcatcactgcaaagagtgacacgacaaaccatgtcatttgcgtaaaggttatgggaaacggaagtctaaaatcattgatagaatacagtaccttttccacagaccagatactggtatagcttcgtattttcttcatgtaatcaatcctttcataaaaaataggggtagctgattgagccaccccgtaaaatagaaaatctgccagtagtaatgtaccgacagatttaatagacgatttcaaaaatcccatgattggttgagataaacgttcctgaaaggtctaaatcccgaccataggcttgataatcaatatagttttgaagactagctggtacttcgcctaaagcacccgtttcttcaatgtagtagcgtgccacgtcatacatatcatcacaatcggaatgaatgataatatcctcttgatgttcgcttagttcttcaatgcttgaaaaatgagtgagcagagcagatagctccgattgtaattcttcgggtaattccgataccatttcccatagtcgattgagttcgccaatggaagtgtattcgtcaaccgtaaagggtaactcgtagtcatgaatggcgtattcctcatattcatcattcaagccgattttctctttgacttcctcaaagtcaatgggaaaggtaaaccacgcaccgaccaattcgccctcattgtatttgcctaaattcgcaatatagacttgcatatcgtccatatattcacgtcctttctttgtagagattcaaaaatccctaccgcacttcgtttggtgtaccattcctttgcggaacataagaaaaccacttatattccacaaaagaacggttttatttaagcaccaataatgcgattgaatagctctagtaaaatgtcttttactccagcagcgttgaagactaagccaaccgcaataatcgcaataattaaaaagccaatcagtttgctaaactcacgcttgaagccaagatacaagccaatcacaacgattgctaaaagcaccagtgattgagcgtttgatagaaaccagttataaaggttttgtccaaaattcataaaaatgttctcctctctatattcaatgaatttgtatttgagttatttttttgttgttatcacgtcctgttcttttactgactgttgcttcaaaatctgcttgtgtcggtctgtcagtttcgcatggtcgagaatgtcttttacaacctgcgtctggttgatttcatcaagtttaatcgcaacctttaaggtcggggcaacttgatgagatagccagttcagcgtcctttggaaggagtaaggctctggttttgtggttagttttaatcgttcacgattgttcccaataaaccaagcccattcttcattcagtttccaatcagaacgaggtttggaatcgtctttatctacaaaacggatataccgattgataattttaaaggcggtatgctctggattgtcatagacgagtaaatcacggactgcataataggcacgctcatttttcaatcgaatctcaaaacggttttttacttctgcgtcttcaatgggaatatcatttttcttgtactgctcgtagtccttttcatagatacagaaataaacttcactttgtaatgaaccgatatagagggtgtttcccatacattccttttcctctttgcgtaccagttcgccactgcgatagcttttaaaactgcggaagacggagatacattcttcctgttggcacttttcagtgagtacagggatatttaaaatccctgtcttatcgttaatggcaaggtcaaggcgtttcatcacaccgccagccaccaaaacgtccataaagaactcataccagcttctttgttgtgccagaagatagctttcaaattgtctgcacccacgacctttcaattccaccagaactcctttgtccagttcatgggagcaaaggacgaatatgtcgcctaaagcataatgctctgaataagaatagaaaccatagtcctcatgaagaaaataggacagtttcagttgtaagatgttttcgaccacctgctgtacgtctgttgtcggaaagcgaattcttacataatcaaacagcatttcaaggggagcgtcgggattgaagcgttccagagcttcccaaagggactgctgtaaatcctctgatggcttgacttttcctgtttcaatatcgcttagatactgccttgtaataccagtcgcaacagctaaacggttttgagatagtccataagccaagcgtttttcttttaaatgctgtaaccaagtttgttcattcagtaaaaatccctccaatcaaaaaggcgtatgtcaacttttaaagcccatttgacatacgctgaaattttgtaaatcccttgtaaccaaaggattttctaatgtttttttgactgtttcctgtcgatttgtacccccctgttagatacggggggttaagtgctggcgtggctattgccacaccagccagcaagatcagtccacacctgcgacttccgcttcgcacgtcgcctgcgtggactgtctgctgttggataactttttaatttcctccaagaaatcatatccttttggtacaaggggagtataaaactctgatatgacacttgttcctacatcaacatagccacgacctttgattcgctttaagaagaaatccttttgtacgtcactgccaaacatcatgccatagcccatttcagacatacgacctaaagccactctgaaattaaactgatcacggattccgtcgcctaaatattttgcgtctggacgttgacaagccagtattagaaagaagccagcttgacgacctaacatgacaatctgtttcagcttattcataactgcggtgttttcttttgttcccagcatttccatgaaagcgacgtattcatcaaagattaagaagtgtgccgggagacctaagtaagcataatttttgccagtcttatagttcttcatctgcttcatttcctcactacgtttcatcatttcttcatagaatgtttcaatgcaagaaagcaagtcttcttttctatagtagacatttgccatcacagaacctaagtccgcaagatcagcatttttcgggtcaagaatatacagttttgaatctgtatgaagcaaggcttcaatcagtgtcagtataaagtaagttttaccgccacctgtaccaccagcaatcaacatatgagggagcttatcatattcccaccatacgtttttcattaagcgaagtttaccatctttagcttctacttcatcaatagaaatacgactggctatggtgtcatagagcaaagtatattccacataggaatcctttaactctttatccgtcagctcacagtacaagccactctctaatttcttttccaagtgtaagagttggtcttgatattttcccagcgtgatttccacccgtatctgtatcaagccatttttaagtcgataatacattttagggaagtaggttatcttttcctttgtacgaccagcactatctttaaagaaaccctctgttttgacctgttcagattcataccacttgttttcaagtatcatctttgccagtttttgacggtggtaaagttgtttaaccgtatcatagcgaacccgtttgaatacaaacgctaccagcaagcagataagaattgcgacactgaaactgataattaaatagggaatgtcaatcttatctgcttgtgataggttaaaatcctgccagttgatctgctggattgtcttcacatgaaacagtccgacaaccagcaggaaaacaggcaggagtgacgctatcgtaaaatgaaagactaaatctttaccagatgggcgaatccttttaccacgctgtttcatgcgaaaaagtctcctttctacctagcgactatttgtcttgtgtcggttctttctttgcttgtggttgagctttgaatgaactagaatcctttgtcagcacaatatcgtctgccttgatataccagtcaacatctgctccttgataggtggcagtagcaacggtgtccgcaatgggattgataagttccacccgtgcgttataatcaaactctttcaaaggcacgctggcaggaatacttacttgaatcatgcgtccttgtcctttggattttaagtcataggtacgttccttgatttcatctgaaaccgacccgtcttcattttggattctcacttcacgacgtagagcagagaatttcaattctccaaaagtcgtgtctttatctaatacaatgccatttgctaatctcatcatttttcctctctttctttattcttttatcatgtcgtcagcatgtaaaaggtaatttgtaaaaccacgagtgccgattttgtagccctctgcggtaatacgtggattgactaacttcacacgttcctcaaagccgaaatgtttttcgccagcttcagcaggaagcaccaccacaatatcatctgctctttgaacatcagaatagagattatagcttcttgataagacagttagccgtccgttgattcttcgctgaacgactttatcctcgccagcaaattctaaattgccgaatgttttttccatgttgggaatcacaaatttaagttccatatttttacctatcctttcttttttattggctgaatgaatgtttgatggtcttaaagagtggggaacgaccttttgattcttgattttttgttttcataagttcacttcctttcaaaatcgggtaaaaaaatagacacctcattttttgaagtgtctacctattaaatattcaaattttattggaagtatctttatatcttcacttttcaaggataaatcgtcgtatcaaagctcattcataagtagtaaattagtagtaaattgagtggttttgaccttgataaagtgtgataagtccagtttttatgcggataactagatttttatgctatttttatatataaaaaatataaaaaattggttcataaattaatttattcgatagaatgattcaatcgtctacttaaactttccgctgtgagaaaagtgcctgaaacaataacgtttcaggtactcgggagttttgagaccttaggctcaaaactaagtcatggaacttcttcgaagttcgctgatgtccgttctcacctaaggaaagtttctaagaggatcttatctacattctaatttctgagcttttcttattacatgatcccgttctttcctgtcggtaggttaatccctgcttccatcaaggcatcatggtagagtttatagtaggtatgatagacagtcgtctgggttccattttgcgcagtcatcgcgatgcggaaggaataacgaccatttttttcgatctgtgggcctaaaatcgtaggacctgtcaacacttctgggtgtttgtcttgttcagactgattgacctgagcaatcacctgatagatcttgtcgagatcggtatttgcatctagcggaatatcgattagcacgcgcatatcgccacgtgagagattgctgacgacggtgatgttgcgattcggaacaaagtggagagtaccatcaaagtctcgcacctgggtcgtccgaatcccgacactgctgacgatgccggcaatattaatagacccattcgtgagacgaacattgtctcccacatccagctggcgttctaaaaggataaagaaaccattgaccaaatcggaaagaaagccctgggctcccatcccaatagccaccccagcaatcccagcaccagccaagagactagagactggaaggcccagaatcgacaaaatccagtagatcaagatgaaatacaaacaatagtttaagagactctcaaccaaacggagaatcgtatttttacgggcttcatcctgcaccgtatacttaaaggatggtgttaatatccgcttaaccaggctatggatgacctttttcgcgataaaaaataaaagaaagacaaaaatcagagagatacattttgatatcagatcatcaaaaatcttcgtccagtctattttactgaaataacgttggaaagcttgactcatttattcgggcctttctatcaaagaatagtatgattatatcaaatattcggaaataaggctattttttgaaaatttcattgctttccccccctaactatcgtataatattccttaattattttttaaggaggtcttacatgattcatcgattgattaccacttggaataaaaccaaccttatgaaaaggatcgcaatcgggattgtacttggtgtcatcctagcccttctcttcccgaaagcaactggcattggactcttaggagagttctttgttggggggctccgtgcgatcgcacctcttttggtctttgcactcgtcgcaaacgccctctcccaacaccaaaaagggacagagactaatatgaaaaaagtcatcgtcctctatctcctaggaacctttgctgctgccttcgttgctgttttggtcaattacatcttcccgatcaccattaccctgactggaaaggccgctgaaggatcctctccaaacgggattggcgaagtgattagtaacctcttgctcaagatcgtcgacaacccggtcaacgccttgcagcaagccaactacattggaatcctttcttgggcaaccgtctttgggattgccatgagagaggcgagtgaacatagtaaagacctcctccaaactctagcagacatcacttcaaaaattgttgagtggattatcaacctagctccatttggaatcttaggcttggtcttcacgaccatcgctggccaaggactcagtgcccttagtaactacgggattctcttacttgttttggttggtaccatggcatttgtagccctggtcatcaatccattgatcgtctttttcatgatccgcaagaacccttatccccttgtttttaaatgcctccgtgtcagtggggtaacagccttcttcaccagaagttctgcagccaatatccctgtcaatatgcgtctctgtgaagagttggggctgaatccagacacctattctgtctccattccacttggttcaactgtaaacatggcaggtgcagccgtgacgatcaatattttgacgctcgctgctgccaataccttgcacattcaggttgactttggaacggcgctcatcctgagtgtcgtagcggctatctctgcttgtggagcatctggagttgcgggaggatctctccttctcatccctgttgcttgtagcctctttggtatcaccaatgatttggccatgcaagtcgtcagcgtcggctttatcatcggggtcatccaagactcatgcgaaacagccctcaactcttcgacagatgtgctcttcaccgccatcgccgaaatgagtagctggccaaaagaaaaacgctattaaatgctcctatctcaaatagacaagaaaacccagatccatcaatctgggttttcttatttcttaaagtattgtttgctttctttgatgatgacaggggagagagctaaaagggcaatcaggttgggcaaagccatcagcccattcacaatatccgcgatcacccagaccagatccagcttaaggaatcctcctagtccaaccataaaaacaaagaaggtccgatagaggttgatatgtttaacaccaaataggaattcaaaacaccgctctccgtaataagaccatccaagaatggtcgtggtcgcaaaaagcactaaacatagggtcagaatgatgcctccgactgggccaaagacgcctgtaaacgtatcctgagtcagggtactagtactgcccttagccgtccactcacctgaaaccaagagcgaaagtcctgtcaaactacagatgataatggtgtcaataaaggttcctgtcatggagatcaaaccttgctcgacaggttcattagtcttcgccgcagctgctgcaatgggggcagatccaagacccgattcattagagaaaactccacgcgccacccctttttggatagccattttgaccgttgctcctgcgaaacctcccatggctgcagtccctgtaaaagcacccgaaaagaccgatttcaaggctggaagcaattggtccagatgcaaggcaatgatcgtgacagtcgcaaagatataggcagcagccataaaaggaaccactttttcagagactttggaaatccagtgaatccctccaaagatgatggtcgaaaccaccagagcaatcactacactagctacttctggagctgttccaaaactggcttgaagggatcccgtaatggaattaacctgggtcatggttccgatcccaaagagggctaccaacactcctgcaaccgcaaagaaaatagccagtggtcgccacttctctcccatcccgtgaagaatgtagtacatcggaccacctgagatatgaccattgtcatccttggtccgataacgaatggctaagagcccttctgcatacttggtcgccattccaaagaaggctgccatccacatccaaaagagggcacctgggccacctgtctgaatcgctgtagctacccctacaatattccccgtccctacagtagccgctagagctgtcgcaagggctccgaaactcgagatatccccgtgtccctcatcttctgtaaagatcaagcgaaaagcttttggaaggtagcggatctgaagtaaacccaagcgaagggtcaggtaggtccctgttcctaccaagagcaccaacagcggggcgccccacactagattatcgagttgttgaaaaaactgcaatacatgatccattttctgtctcctttttcatcgaccactcgacagaaaagagaaaaagaaagagcacatgtcaaacatgtactctggtcctgcttaaaataggggacttcccctatttttcgctctgtccttttacctgagagtttgagtagatgcatcctctaccttgccccttcggtgccatttctggtctctccagagttccgtccattcacagtcactcacgctcctacaaacttcattcggtcgtatgtaattttctctattttaatcgattttcaaaagtttgtcaatcatttctgaaaatatcttgtaaactacctgaaaatgcacagtttttaatcactcaaggagaagtgattggtcatgaggttgctagcatcgagcaaaatcttgtccaagagttgatctgtcgcttcctggatttgatcactcatggcttggttttccgtctcaaaatcaacggtttcacctgctgcaagtgcacgatcgactttattgatgcgtgcatgtccccaagccattgtcgattcttggtagtcatctagatccccaacatggtgagcatagtgagggtcagctagtcccgcaataatccggttagcccagtagaaggaatccgtagttaccttagccgtcgtattggcaaagtagtctggcgttgtatccacttgggcaaagaaaggaacagctgtattgtatggcatggagccataagaaatccattggatgcctgtcgtttcttgtggtttattgggacgcaattgcagaatcgctgtctggctggtccggttgatcccgatcgtccggaaggtccgctgactcacgtgatctccttcagggccataaggatcgtagatagtgtcttggtagtggttgctcaagacatatttgacatcttcaatcgttaccttgcgataaggtttttgacaccaaggaatctcaaaactccgtggatcctgctcgatttcaggattgaggaaacgctggatggcccaagcccgcggtgtattgtagtgacggtccttgtctttttggctaccaaaggcatagcgtggattaaagcctttcccttcttgatccagaatcaaatggtgctctgtgacaaacttttcaagattcgggtcacaaagaaactcatcgggattgccaaattcaaaataatcacttcccagttggttcgggttggtcacataggcatcatcagggacacggcgcgccatccagtggtgacctccgatggtttccaaccaccagatttcattcacatctgaaatcgcaatcccgttagactcataagttccgtactcttccaaaatctttccgagacgcaagaccccttcgcgggcagtcttaacataaggcaagaccaaggtcagcatgtcttcctcaccgatgccactctctacaagaggatctgccccaagcacacggctattggtcgtaatggtctctgtctcactcatagctacattatagacattgatcccagcttctccccagatcccgtctttaggaatggcatctggaaccgctgtatagcgaactggattatctggcaagtcgatttcaaaagttgataaaacagacttgtaatgacgtggttgatcttccggtttgaccacgatcaatttcttgggcgtaaaaacgccattttgagaatcctctgttcgtgctacaatggtcgaaccatcatagctagcattttttccgactagaatcgttgtacacgaatctgcactttcacgtttacgcatgcgtatcctcccaaatcattcattgcctctattatagcacttttaaaagggaggacctattgaaaatccgatttgaaaacggatcgttttcgatatttttcaatcattttcattttataaagttttaaaaaccctagctgataaacagctaggatttagaatgtagataaaatttttttcttaaaacaacttaagtgatatagaataattaaaactgatacatactaataagctcaatcagacaaatactgaaactttccgccgtgagaaaagtgcctgaaacataattgtttcaggcactcgggagttttgaaaccttaggttcaaaactaagtcatggaacttcttcgaagttcgctgacgtccgtactcacctaaggaaagtttctaagataactttttcttcaatctggatctagctgatgaacaactagggcttaacttatcctttaaacgtaacaatggttgcgccacttccacccgcattttggggggcatattcaaaacttttgacgtgtttgttgcggcggaggtacttggtcaccccttcacggatgacacccgtcccaatcccgtggatgatatcgacttgggccatgttgttgagcagagcctgatcgataaagccatcgagctcttgcatggcctcttcatagcgttttccacggaggtccagacgcgctctcggcccactcgtgttcgaacgtttgacgacattcacctggcgtttcttaggttgagctgcttctttttcagccttgatgaggttgaattctttttcttccaaggtcatcttaatcaagccgacttgcgcctcccagcgaccatctttgagttgcttgaccagggttccgcgttggccatagctgataaccaagatttcatctcctaccttaggagcacgcgcctttttggcttttttcaagaccttgtttttagaaagatcgacggtctcaggagcgagttttttcaactgagccttggcttcaatgatttcatgtggtttcaactgggatttggcgtgaagcccttgaaggatacggtcactctctgagagggccatgtccacaatttccttggcttcttctctcgccttattgagctctgtttctctctctctagtcagttcgttatagagttttcgaagagcgcgattgaatttgagattttcttgctcgacctcttgaatggtatctaagcgcttgcgactttctaaggtctgcgcctccaatttttcaatgatttgattgacatcattatccgtattggtcatcttcatggcatcctggataatggtctcagacaagcccaaacggcgggcgatttcaaaggcattggagcggccaggaactccttgcatgaagcgataggtcggacgcagactcgctgtatcaaattccatgctggcattttgcactcctgcagtctcaatcccgtaggccttgagctctggatagtgggttgtcgccatggtcttaatcccgcgtaagcgcaggtcttctagaatggcaatagcaaggccagccccctcttgaggatcggttccagcccccaactcatccagaaggatcaaggaggcggtatccacttgatgtaagatagatacgatattggtcatatgactggagaaggtcgacaagctctgctcgatcgattgttcatctccaatatctgcaaagacctgtgagaagatccccacacgactacctggatccgctaggatgggaagaccagactgggccataatttgcgctagtcccagcgtttttagcatgatggttttcccccctgtattgggaccggtaatcacaatttctgtcaagtcctcggtaaaatgcaggtcattcgcgacggcattttcaatcaagggatgacgtaattgcaagagctgaatagagcgattgttactaacctctggtaccactgccttataatcgcgcataaagcgatacttggccttgatcaagtctaagtgaccgataatccaagcattatttgcaatctctgctgcatgagggcgcagggtgtcagacaattcctccagaatctgaatgatttcatagcgttcatcggctcgatggttggcgatttcttcattgagattgacgactgctcgaggctcgatataaacggtattcccactggctgagatatcgtggaccacccctgcaatccggttgcgataggtgttttttactggtagaacattgcggccattccgactagcaatcacagcatccgccaacatatcggtcttgcttttcagcagatcttgtagaatctctctgacctggtgttcattttcctggattcgacgacgaattttggccaatttttcactggcaaaagactcgacaaagccaccttcgttgatagcttgaagcccaccttgtaggcgaggtaaatccaccaagttgtcaaagaggcgattgagcctttccagacggacattttccaagttgtcgtagaaatccttgagctcatgtgtcacccgaaggaccgcttttagcgctagtaattcatcgatattgagggatgcctccatccccaaacgcttggccactggacggacatcttgaatggtcgacacggcaaagcgaggctcttccaagaggatctgctccatatcttctaactccataaaggccgtttcgatgctttcttttttatcagttggagtaagggctgctagctccatctccccttgttctgtctgtagatagggttcaaagagttgcttgaccttgccaaactccagaatatctaagatttttttattcatatttctcctacaaaaaaagtgagcgtccttccttgaatcggacttgtctcactcctttcttcatttttgctccttaagctccgataatcgcagtcacccacaagttgtggaacagactggaactgatcggggtatgaaggatgataaagcggatcaatccacttgcatttagtctattttggatggaagccatgggaaccgttgagaggacagtcaagcccatctggatgaccaagagagttatcacgacggcgatcacacccgctccaatttgatacttgcgatcctccagtttttctggctggggtaccaagtgcataaaaatcccaatcacacgaccaatcagatagactatcgcaaaaatcaatacataagctaaacctgcataaaagatgtcatctaattgaaataggtagcggttggcataaaaataattcaccgattgccgagtaggactcgaaaaaggaacccatagagacaacaccttagccattcccttgtagctaccacctgcaatcaagagggccactaaggtcactagaaagtaataggactggaggataatccctcttgcatagccaatataaaagctccatgccaaaatcaataagattaagaaagttaacatgtatctcctcttatttggatgatttatcctttaagtcgtctaaagccttgcgacgaaaatcatctaattctttttctttgtcgtcaaactcgatctcgcgattcaattgcatggacaaactgtttactgccaataagatcgcgatggtttcgtcatctgcctctggcatttgttccttaattgcttggtatttttctttcgcaacacgttcgacttcttccataaacaaattatcatggttggttgttaaagtgagcgctttgtttccaaatgtaaatttatatctatttaagctcgccataaaaatcacctcacggtattataccaaaaaaggctagctttgtcagtagcaaagcccctcttcacagggattttccagtggattctttctttctttttgctccctctctccctgaatttgtggtacaatagtggttatggaaagtatgacactcactccaacacaggagcaaatccttgattttgtccatacctatcgcagttctctctctcaaagcaagaaccctcatatggattatttctttcgactagagggagcgaccgtttcgatctacaagtctggaaaagtcttgctccagggcaatgaccttactccttacctggcctttttcgggcaagatgcggggaaccctaaaggttctaccacttcatctgcacgacaagatctagccatgatcggaaccgacgaggtcggaaacggctcttattttggtggactcaccgtcgttgcatcctttgtcacacctgaccagcacgactggcttaaaaagcttggtgttggggattcaaagaccttggatgatcgaaaaattcagcaattggctcctctccttgaggaaaacatccagcaccaagcactcttattgtctccaaagaagtacaatgaagtcatcgcttctggctacaatgctgtttcggtcaaagtggccctgcacaatcaggccatctaccttctgttaaataaaggagtccaagcagagcgaattgtgatcgatgcctttacgacggctaaaaactaccaaaaatacgtgaaagctgaaaaaaatcaggtctcccaagctattgagttggaagaaaaagcagaaggtaagtatttagctgttgcagttagttccatcatcgcccgtaatctcttccttcaaaatctggaagatctgggtaaggaactgggctataatctccctagtggagcaggggcgaagtcagaccaagtcgctgctaaattgcttcagacctacgggatgaaagctctggattattgtgccaaactccattttaaaaacacagaaaaagcaaagaaattactagaaagataagttatgtcaaaaagaagttcaaaacattcatctagctcaccagtggtgaggttccttaaagaatggggcctcttcagcatcatcgttggtctcatcatcgcctcacgtatcttcctttgggctccggtcaaggtggatggccattcaatggatccaaccctggctgatagcgagtacctccttgtggtcaaccacctctcgattgatcgtttcgacattgtcgttgccagtgaaaaagacgacgacggtaaaaccaaggacatcgtcaagcgggtcatcggtcttcctggagataccatccagtacgataacgataccctgtatatcaatggaaaaaagaccaatgagccctatttgaaagactacatcgctcgtttcaaaaaagataaattgcaatcgacctatactggaaaagggttcgaagaaaatggagaactcttccgccaattggccaatacagctcaagcttttactgtagacaaggatggcaatcctaaatttaccttgaagttgctcgacaatgaatacctcctacttggagatgaccggatcgtttcaaaagatagccgtcaggtcggagctttcaagaaagaacaaatcaaagggcaagccgtctttagactatggcctatctaccctttcaaaacttattagtatagatcaaaaaactaaggctgaggcaatacgtcccagccttgctttataaaaaggaaagaaatgatggaatattatttttctggtactattgagcgcattatttttgaaaatcctagcagtttttttcgaatcctcttactcgacattagcgatacagatgcagaagactttgatgattttgagatcattgtgacaggcaccatggcagatatcatggaaggcgaagactacaccttctggggggagctggtccatcatcctaaatacggagaacaactcaaaatcagtcgctatgaacgtgccaaaccctctagcaagggcttggtgaaatatttttccagcgatcacttcaaaggaattggtctcaaaacggctcaaaaaatcgtggacctctatggggacaataccattgacaaaattctggaagctcctgaaaaattagaagaaattactggtctctccaagaaaaaccgcctggcttttgtggaaaaacttcgtcagaattacggaacggaacgcattctcgcccaactagccaattatggcattcccaataaattggcctttcagatccaggatttctacaaggaagaaactctccagatcgtggagcaacagccctaccaattggtggaagacatccaaggtatgggctttaaaatcgcggaccaactagcagaagaattgggtattgcaagtgacgctcccgagcgtttccgagcgggtctgatccacagcctctttagctactctatcgagactggaaatacctatatccaagccaaggacctcctgcgctataccattgaccttctagaatcagctcgtccagtagaattggatccttccactgtcgcccaagaattaggccacctcatcgaggaagacaaggtccaaaatgtggacaccaagatctttgacaacagccttttctttgcggaggaagggattcgcagtcatattggccgattgctggagaagggtaaaaaagcttcgtttgaccctgaaaaaatcaaccaggcgattgaggatgttgaaaaagatttggggattcgctacgatgcgattcaaaaagaggcgattcaccaagctattcaaaacaaggtctttatcctcactgggggaccagggacaggaaagactaccgttatcaatgggatgatcagcgtctatgcccaactccaccagctggatcttcggaagaaaaaagacctgccgatcctgctggctgccccaacgggacgagcagctaggcgcatgaatgagctgacaggacttccgagcgccaccatccaccgccatttggggatgacaggagatgatgacaccagccacttagaggactatttagacgcagactttatcattgtggacgaattttccatggtcgatacctggttggctaatcaattactcagcaacattgcaacggatacgaaactcttgattgtgggagatgccgaccaattaccttccgtaagccctggtcaggtcttggctgatctcttgcagattccgagcatccctcagaccaaactggaacatattttccgacagagtgaggactcgaccattgtctcactagcaggagatattcgccagggcaagcttcctcaagatttcacagaacgaaaagccgaccgctcttatttcgaagccggaagcgaacacatccctaagatgatcgaacaaatcacttctgctgcccttcgtagtcaaatccctgctcgagatatccaagtcttggcccccatgtacaagggccaggccggcattgacaatatcaatacgctcatgcaagaccttctcaatccagctgtcaaagatcaggtcgtctttgactcgccagactgccaataccgcgatggggataaggtcatccatctggtcaatgatgcagaaagcaatgtctttaacggagatatcggctacatcaccgatcttctcccaggaaaatatacggaatccaagcaagatgaattgaccatccaatttgatggcaatgaaatcgtctacccgcgcaatgaatggtacaagattcgcttagcttacgccatgagtattcacaaatcacaaggaagcgagttcccggtagtgattttacccattaccaatcaaagccaccggatgttgcagcgcaatttgatctataccgccatcacgcgctctaagagcaaactgatcctcttaggggaatacagcgcctttgattacgccactaaaaataccggtactgcccgcaagacctacttggtggaacgcttcaaggacctggacggaggcgagacaaccaaagactcttcttcagccattgccacggcttctgctacagtcgagtctacacgaagcacgaaagggactgttgaaaggaaggctgagcctgatgaaccgactgtctatcgactgacagaagacaatctccacaccatctctcccatgatcggactgactgaaaaagagattgcaaccttttttgatgtcaaacaacctaattgataccccaaaaattaaaataatatatttttttaaggctcattcaaatacagctgaaactttccgccgtgagaaaagtgctagaaacactatggtttctagcactcgggagttttgaaactttaggttcaaaaccaagtcatggaacttcgtagaagttcgctgacgtccgtactcacctaaggaaagtttctaagatgactttgtcatcaatcttaggcgactagtgaacagactagtcgtcttctttttcttccactaaaggcaactcggtatgatcgacgaaattggtcatggtgacacccaagaggcggattccagtatttgtcgattcgatttcttgaaaaatatggcgagcggaacgattgatccgctcagcctctcgtgttggctccgtcaatgtcattcgcttggtcagggtggtgaagtctccatagcgcacctttaagaccaaggtctttccttgcttgccatgtttttccagcgattgggctaccttactggacagattggcaatttcttctaaaatatcatcttcagcatagaggagcttgcggtaggtccgctcttttccgatcgacttgcggatacgatggctcttgacagggctattgtgaatccctcgcgccttacgaaagagatcatagccaaagcgcccaaatcgatcaatcaaggtcatctccgggatagctaaaagatccgcgccagtatagacacccatctcatgcaggcgctccactgtcttctttcctaccccgtgaaatttggcaatgtccatctggctcaggaaatcctcggcatcctccggcaagaccaccgttaggccacggggtttttggtagtcacttgccatctttgccaaaaacttattataagagacacctgctgaagctgtgagatgcagctcttcccagatcgcatgctgaatcaagcgagcgatcttgacagctgatttgctctggattttattttccgtcacatccagataggcttcatcaatactcataggctcgatcagatctgtatagcgcttaaaaatctcacgaacctgttcgcccacttctcggtatttttcataatttccagagataaagatcgcgtggggacaaaggtctagcgcttctttggaactcatagccgaatgaatgccatatttccgtgcttcatagttacaggtcgagaccacacctctccctcctgattgacgagggtcctggccaattacgacaggcttcccctttaaactagggttatctctttcttcgacggcagcaaaaaatgcatccatatcaatatgaataatcttgcgactcgtatcattcaccaatggaaatatcagcatttttcaccctcctattttctattataagaggaaaaatttagaattgcaaaaatcggcccttctaaaaacatgaaaattgatggaaaaccgtatttgttttcaaaaatgtagtacagtatcacagaagagttgaaactgtattataaaagaatctgttgtttttcgcaatttgcctttgtgtaaccggtttctgtgtggtatactactattgtaagtgcaacagatatagttgctagaaagacaatagaggaaaataaaaatggttgttaaaacagtcgttgaagcacaagatatttttgacaaagcctgggaaggcttcaaaggtgaagattggaaagaaaaagcaagcgtttctcgcttcgttcaagctaactatacaccttatgatggagatgaaagcttcctagctggtccaactgaacgttctcttcacatcaagaagattgttgaagaaacaaaagctcattatgaagaaactcgtttcccatacgataaccgtccaacatctatcgctgatatcgcagctggatatatcgacaaagaaaacgaagtcatcttcggtatccaaaatgatgaattgttcaaattgaacttcatgcctcgtggtggtatccgtatggcggaaactactttgaaagaaaatggatacgaaccagatccagcagttcatgaaatcttcacaaaatacgttacaactgtaaacgatggtatcttccgcgcttacacttctaacatccgtcgcgctcgtcacgctcacactgtaactggtcttccagatgcttactctcgtggacgtatcatcggggtttatgctcgtttggctctttatggtgctgactacttgatggctgaaaaagcaaacgactggaactctattactgaaatcgatgaagaatcaatccgtcttcgtgaagaagtaaaccttcaataccaagcacttcaagaagttgttaaattgggtgacctttatggtgtagacgtgcgtcgtcctgccttcgatacaaaagaagcgatccaatggacaaacatcgccttcatggctgtctgccgtgtgatcaacggtgctgctacttctcttggacgtgtgccaatcgttttggatatctacgctgaacgtgacttggctcgtggtacttacactgaatcagaaatccaagaattcgttgacgatttcgttatgaaattgcgtactgttaaatttgctcgtacaaaagcttacgaccaattgtactcaggtgacccaaccttcatcacaacttctatggctggtatgggtaacgacggacgtcaccgtgttacgaagatggactaccgtttcttgaacactttggacaacatcggtaactctccagaaccaaacttgacagttctttggactgacaaattgccatatagcttccgtcgctactgtatgcacatgagccacaaacactcttctatccaatacgaaggtgtaacaacaatggcgaaagacggatacggtgaaatgagctgtatctcatgttgtgtatctccacttgacccagaaaacgaagaacaacgccacaacatccaatacttcggtgctcgtgttaacgtgcttaaagctcttcttactggtttgaacggtggttacgacgatgttcataaagactacaaagtatttgatatcgatccaatccgtgatgaagttcttgaattcgaatctgttaaagcaaacttcgaaaaatctcttgactggttgacagacacttacgtagatgctttgaacatcatccactacatgactgataagtacaactacgaagctgttcaaatggccttcttgccaactcaccaacgcgctaacatgggattcggtatctgtggatttgccaacactgttgatacattgtcagcaatcaaatacgctacagttaaaccaatccgtgacgaagatggctacatctacgattacgaaacaattggtgaatacccacgttggggtgaagatgacccacgttctaacgaattggcagaatggttgatcgaagcttacactactcgtcttcgcagccacaaactttacaagaacgctgaagcaactgtttcacttcttaccatcacttctaacgttgcttactctaaacaaactggtaactcaccagtccacaaaggagtatacctcaacgaagatggttctgtgaacttgtctaaattggaattcttctcaccaggtgctaacccatctaacaaagctaaaggtggatggttgcaaaacttgaactcacttgctagccttgactttggttatgcagctgatggtatctcactcactactcaagtttcaccacgtgctcttggtaaaactcgtgacgaacaagttgataacttggtaaccatccttgatggatacttcgaaaacggtggacaacacgttaacttgaacgttatggacttgaacgatgtttacgaaaagatcatgtcaggtgaagacgttatcgttcgtatctctggatactgtgtaaacactaaatacctcactccagaacaaaaaactgaattgacacaacgtgtcttccacgaagttctttcaatggatgatgccttgaactaagattcaaataggtcttaaaaaccagtcggaaacggctggttttttcatccccatcgcaagagtattctgaattttgaaagagtttaagagcctactatatagagtttgacagcgctttctccaagtgttatagtagagctgtaaataagatagaaggggtgatcctatgtttttaacatttattttcgctattatttggctctttatcctgattgcactgatctttttagcaacccttctcgtccaggatagcaccgtgcaacaccaccacccgagttaacgaatgataagcctaaacaatagctattctaaacgaattcagaaaggataagaaacaaactagaattgtcaaattttagttctgtctctcgtccttttttgctataatagaaacagattatttagtaagaaggatattatggaagagtcaaaacagatcaaccaagtgatcgacgtcctgatgttagctggaaccctcctgatagagagtggttctgagattcaccgggtcgaagataccatgatccggatcgcccactcacagggaatcgtcgattgcaatgttttagcgatgccagtcgctattttcttttcaattgagaatgccaatgtcacgcgcatgaaacggatcttgcggactaattacaatattgaaaaggtctgtgatgtcaatcagatctctcgtcaactcgtctctggagagatcgatctcgagcaagcctaccaggccctgagcgagttgaaaatgaagcacgttccttataccaatctccagttgaccattgcggcaaccctcagtgctcctttcttctccatcatgtttggaggaaatttctatgatgcgattggagcaggtattgcgactgtctttgcctttgctttttctcttgtcgttgagaaatacgttcgcattccttttgccactgcctttgcggccgcctttgtctttggttttttggcccatatctggacgcgctatagtggttttccttccaataccgatctcattatcgcaggctgtgtcatgcccttcgttcctggaatcgccatgaccaatgccgtccgagatctgatgaattaccacctcaactctgggatgagcaaactctttgagactcttctcattactcttgcacttggtgccggtacaacggtcgccctcgtccttatgaaataaaatgatgaacctaactgaatttttaatccaagcggtggccagtttgattgccatcatcacctttttaattgtcctaaatgtgcagcgctccatgttgattcctggaggaatcctcggtatgggcatctggctactttactatatcctgaaagggcctaccaatgtcatcgttgcaacctttattgcagccattgtcggctcctgtatcagtcagattttaagtatcattctcaagacgcctgttgtggtctttatgttgtccattctcgcgccattggttcctggatatatttcctatcggactacttccttctttgtcagtggccaatatcgccaagcagtgaccagcgtgaccctggtggttattctagccttggtgatctccatcggaatggctagtggatctgtcgttttgaaactctatcattcttaccaacgccatcaaaaaagaaaaatgaccaatgctaactagcattggtttttcaaaacttatctatgtaatcgcttgcgtttttgtttaaaaggagtacaatgatagtgaaataacaaatcctctaaaggatgcgaggtgctgtatgatggtaaacaagtatatcaagtatcttccttggatgatcctaggagccttcccctcctatcaatcagcgacttactatgcccgtaattcatttgacttgttctatctgaccttgaactttctgattgtgtacatcgctttaatcgtcttctatgaaaaggttctaagagacaaatgcaaagaactcttcatacgaatcatgagcaatcctaaaaaagataagcaaggataagagttgaagaggctgggacaaaagtcctagcctctcaattgtttttggattgtcgagcaagacgcagtggttgagtgggctctactacgctgatttcatcagcttttacagccctactcaactgtgcggaggtgggacgacgaaatcgaattctaacgaattaccgatttctgtcccactctctttttatagattttctattttttctttgaaacattgcaaaatcggtcccgagaatgatttccttgctgatctagctttttcaaaggagttttacccttaaatatggtagaatagtaacgaaatatactagtagatatcaaataaaaaagaggttaagaatgacaattgggattgataagattggttttgcgacgagtccttatgtcttgcgtttagaagatttggctactgctcgtgataccgatcccgaaaaactaagcaagggtcttctcttaaaagaacaaagtgttgcgccgatcacagaagacatcgtcacattggctgctactgcagcagatgatattttaacagacgaagacaaagaagcgatcgacatggtgattcttgcgacagaatctggaattgaccagagtaaggctgctgctgtttttgtccatggcttactagacatccagcctttcgctcgctcttttgagatgaaagaagcctgttatgctgcgactgctgccttggattatgctaaactccatgttgaaaaattcccacagagtaaggttttggtcattgccagtgacattgctaaatacggaattggaactcctggagaaccaacacagggggctggagcggttgccatgctaatcagccacaatcctcgtattctatcttttaacgatgacaatgttgcccaaacacgtgatgtcatggatttttggcgtccaaattatgcgacaactcccttcgtgaatgggatttattcaacgcaacaatatctagattctctgaaaacaacctgggcggaataccagaaacgaactggccttgtcttaacagactttgcggccgtctgcttccacttgccttatccgaaattagctctcaagggcttgaaaaaaatcctggataagtcagtgtcagaagagaaaaaagatcaattacaatacaactttgatcaatcgattctatacagccaacgcgtgggaaatatctacactggatctcttttcctaggcttgctgtcactactggaaaatcaaccccaactcaaagctggggaccgaatcgccctctttagctatggaagtggagcggtttctgagatctttagtgccaatctcgttcctggttttgagcaactcttagatcacaaacgcatggaaaaactggaccaacgtacggttcttagtgttgctgactacgaacgactcttttatgaggaagtagatctagatcctagtggcaatcaagtgtttgagcctgctacgcatcaaacttttgctttgacagagatcaaggaacaccaacgcacttaccagaaagtagaaaaataatggcacgattaccaggttttgcaaaactttctcccacagaacgcatagaggccttactgaaggaaggcctcttaacttgggatgaagcacagatcttaaaagaacaaaagggacttcccctttctattgcagatcaattgacggaaaatgtcttgtcgacttttgacttgccttttagccttgctccttattttctgatcaatggtcgtgactatgtccttcccatggtcacagaagagccttccgtggtcgcggctgccagctttgcagccaagctcatccaacgttcgggcggcttcaccacccaggtacaccagcgccaaatgattggtgagattgctctgacggatgttgaagacgtagaagttgctagcaagcgcatcctagaggacaaggaaacccttcttcagctcgctaatgaagcctatccttctatcgttaagcgtggaggtggagcgagagatctttgggtcgaaaacaagggggactttcttattgtctacttggctgtcgatcccaaagaagccatgggggccaatatgctcaacacgatgctggaagctctgaccgatcgcatccagaaactctctggtggtcaggccttgatggcaattttatccaacttggctactcgctctttggtgagtgcacggtgtgccatcgattttaaagtactgagtcgaaatcctgaggaagccattgagcttgcccaccggatggagcaagctagccaactggctcaagtggatccttaccgtgcggccactcataacaagggaatttttaacgggattgatgccctagtccttgcaacaggcaatgactggcgggccatcgaagcaggagcccatgcctatgctgcacaaagtggttcttacaaaggcttgagtcactggacaagtcagccgaaagagaaaaaactctatggagagatcaccctgccaatgccggttgcgacaaaaggaggctcgattggcctcaatccaacggttcaagtcagccaccgtttgctaggagagccttctgctattgaattagctggtatcattgcttcgctcggtttggcgcagaatttcgcggccctcaaagcccttgtcaccacagggattcaagcaggacatatgaaactccaagcacgctccctagcccttctagcaggagctaaagaagaggaagttccccgattggtcacccaactccttgagaataaaccctttaacttagaaaaggcacaaacactcttacaagaattgagaaaataaaagaactaagacccacgtcttagttcttttgtgtttgaaaaaattttcttattgttttaaaaatggcaactcgggatgtttcttggtatagagcaccacttcgataaaggtccctacttggacggcaaagagcagtccgacgagaagattaatccgatggtctgtttcataaaacggagagttccataagaagtgattggctactgttgaaagaacacaccagagcccaaagagtttttccttttgctgggtcacttgagacaacaagaggaagacaccaactgatacaacagctgtatagagggcatgcgaagctaatccaccagagatacggttaatggcctcagtgacagcggctaattggctggtttttgtttggcgggcaacgtaccctaaatcctcaatgatctgaaaaccaaagccagagcccaagccggcaattagaatcgatttcagatcttttttgccaaccatcaagactacccaaaaggcaaccagggccttaaagaattcttctgaaaatggagctgtcaaagcatccgtccacttgttaaagacagtggcatccttgatcacatggctattcataatatcaatcaagctattgcctgaaaagctcaaccagcctgctacgaaggctcctccaaacatggcaatccataggatgtaggttggtacggacaactgcttgcccaatcgttttgaaaaaagatagagcggaataataatagcagctaagacagacaagtttaagaccaagtctctgcctgcagactggctaaattcttgttgagaaagatgaccgagttcaaactccaagccaattcctgcaaacagtagaaaaagatagatagaggctctttgaattttagtcatcttgttttcctcccttttgtttctttgagcgaatcaggtagatcacaatcgctagaagggttgccccgaataagcctgctgctagaatgtaatcatagtcaaattcaacgagatcaatcttttcttcataagcagcatcttcttcgtcatctagatcctgcagggcactttttccgtgttcatctgctaccttttgttctgcttcttttctgatttcttgcaagcgttcgaaggttttctcagctctcgccaagctttcctctgttgccttcttactagcttcttcaggctgagaagcaagggcgatttgttcctgatcactcagatcttgttcgaccatccactgagactccaatcgttccatttcagtacgaatcgccccatcttcgaataaatctggatacttggccacaaggtcattgattcttgaaatggtccaataccaagagcgatcattgtaatggtcccctaattcttggtaggcttgataggtgttgagaatattgccatagtagggtaggtatggagcatttcgtggactacccatcgacagccacatggtgcctccacctgcactcgctgggacatcatctttcagttggaaaatatgggcctccatgacatttggattggaaatagggtatttataaaccgcatcaaactctccttttttcggaatgccttttccatccaactccatttgatcctgtggtttatatttggttccttccaaacgattacgttgcagattcatggcatcgcggagggttaattttcgatcggttgtatgaagaaggtcaaaggacgcatcatcatatttaacaggagagcttgggtctagcgatttgattcccgaccaaacccgagagcgatctgcttcttgcaaaggcggattataggattgagaaacgtggaattttccgtccacttccttatagctattggcttctttggcgactttttcaagatcttttgaggcgatcgtgcgttcggtatccgattgatcgacatgccctaagaagaaggtatttggaaagaccgcaaatcgatcctctgggaagagaatcgccgcatattgatggccagataggatttccatataccagacgccttctttatcggcaatggtcacaatatttccttctgcagcgcctttgtcttcgacgattttagcaatgagttcgaccccttctcttgcggttttcacactagggagaacgatacttgtcaagcccgattctgcgaggccatccttgacatagggatccaccttttggatcttgtcatttgctgaagcagatacagtggcagaaatggaaaccccatattcgttgaatcctgcttcgtcaaaaattccctgatcaggggtgacatctggaaccgctgtatacttatagctaatctctggcaagggatattgaaaaccattggcagcatcctcaaagatggctccttttttattgtagacacgctctctgaccacaaaatttttattatggttgggctctaaatcttcggtacgccctaccaaggttgaaccgtcggcagtcagtttcttcccgatgatgaaccctgtacaagcctcaacaggttgagcaatcaacaaaagcggaagcaaggctgctacagctgatcgaaaatagtgcttcttcatcctaaactcctttttaaaaatgtttttccttatttagtatactcttttacaagcctattttgcaagcgattccagcaaccgtaaacgattcgtaaactatcagaatttttgagggaaacactttttcaaaaaagaagaggctgggacaaaagccctagcctctcaattatttttggattgtcgagcaagacgcagtggttgagtgggctctactacgctgatttcatcagcttttacagccctactcaactgtgcggaggtgggacgacgaaatcgaattctaacgaattaccgatttctgtcccactctctttcattttctctgttgatttgcttgccacaattttccatagaggagatagtcgacttcacggagctctttcaggttctgacaaccgagcgcacaaaggagcaatctgaggtcttctttccatccttggacaaggacgatcacttcttcaatgctcttagtctctaccatctcaagaaaaacgcgggaaagtcctacgccacgtgctccaaggaccaaggccttgaccatatcaaggggatgacggatgcccccacttgctaggacctcaacctgatctatctgatcctgtaactgtaagagactctgcgcagttgactgtccccaatcatccagataagcgcgattgccaccacgacgattctcaatataggcaaaactagtaccaccacgtccagaaatatcaacggttttaatcccagcctctagcgctgcctgaactgttttgggatccataccaaagccaacttccttcaggactacaggtacaggaaagccctgcccatagctcttgagatggtctttccaagtgtggaaaatccgctccccttcgggcatgagcaactcttgcatcagattcacatggacttgaagaaagagggggtgtagctcttccactgtccgcaagcccaaatctggctctttatcgatgccaatgttggttgctaaaagaagatgaggatggtcttttttgaccgcatacgattgatcgttcggatccttcagtgctgcgctgtaagagccagtcacaaagagaatcccacaggcttcggctactgctgccaacttttgattgatctctttggcccgtttactcccgcctgtcatggcattgatataaaaaggaacctcccaatcacgccctgcgaaatgggttgtcaaatcaatctccgctagatccacaagggggagggatcggtgaatcagctcgatctcatcaaagctattataggaggagctttgctccaaggcatagcgaatatgctggtcttttcgattttcgctcacgaatctcccatcctttcttggtaaatgacttcaatattcttttccttccagcgctctatcaaggtctgagtctcaactgggtcaaaactaagggcgattccacagtcgcctcctccagcaccactggatttggcacagacagaaaggccctctgtcgcttcttgcagctcttttagagctggggtatagatcaaagggttcaaagactttaggttcttatcggcacgtttgatactggcctcaatttccctttgtttcccttcacggagacctttttcaagattcttcactgcgctctggctttcctgaagaaaatcttccttaatcgctcccttgacctggcggatcaaatcacttgaaatcgctggttccttggtccaaccgaccagaaaattataagcgactgctggctggatcgagcagatctggtagtcccaatccaggtctaaaacttgtgacaggggctgagaattcaaaacttcatgcaaccaagtccgatcaaaggattggtaataaatcaagtcctcgtaggcaatacaagccaaatcgcccatggaaccattgtcccctctttgcaccaagaccactgctgctagtcgaaagagcaggtccggatgtaggtctagttcatacagagcagccatggccttgatcacgagcaagaccacacttccgctggaaccaatcccatactttttcccctcttcgcccagtgttcctctaaggtgaagatcaaagggtttaggggttattccctgatctttcagccactcttccatgagctgaatggtctcttgaatcaaggcgtagtccttatttggggtcaaatccacctggtaaccaaagagatctgaggctagctggtaggctgttgcttcttggatggtagctaacagataaataggaataaactgaatcacagctccataaccaggtgttagcaccgcgtattctccagctagatagagcttacctccagtctgtacctgatacttagtcttcatcttgagggtcctttgtcttagatacgatggtccgatagcgggcatcaaataaaggtaccagctgatccaagtcttcttctaaacagaggactttaacgtttggccctgcatccatggtgaagtaacaagcatggtctgcagcccgaagctcacggacaaattccatagctttgtggctttcttctgtcaagtagctaaaggctggagtggctgttctagtcgtcgcatgcatagcaagggcattgcgctctgtcagctgaccgacccgttcaaaatcattggcagctagatagtccagcatgtccttataatcttgtcgagactcttcgatccattctttgaaattagtcgaggtctccatgcagcgtttcatcccttcccggctggaaacaggcttttgcttgtcattgaggaccagcatgatcatcgcgagttttaggtctgttttgaccttataaatctccccactttctttgtcccaggctgctaagggaccaaagaaagaccgtgaagaagaacccgaagcaaacttggctttttgagccaattcctcctggctcaagcccaaatcataatactgattgcaagccttgacgagagcagagaggccgctcgagctagaggacaagcctgctgcggttggcatgttgttgctggtatccacccgaacaaatctcgcttcatttgttggcttcaagctatcaatcacagctccaattttggcttgctcagctggattttggaattttccatcgatataaaactcatgcgcagtcgcatctgctggcaagggagacagacgggtctctgtatacatattctctaaggttaacgaaatcgaactggtcgaagggaccatctgtttggcatcttcttttccccagtatttgataatcgcgatattggcataggacttagactttacaggttttcgatccatgtatggtgcgctccttctttttctaatgcatgggcaatggttgctgcttcacgagaatccttgacgagggcaatcacacagccaccaagaccgcctccgctcattttagcgcctaaggccccattctcaagggcaacggcaaccaggtggtctgcttcaacacagctgacaccgacggctctcaagtgctcatggcaagtagtcagagcctgtcctaggctcgttagatcattcattttcagagcctcttccacctgctgggtcaactgaccaatctcatggaaatgggacaaaacttcctgccccttggcttcaaccttttgaatcgcctcacgggtattgccgtgaattcccgtatctgcaatcaccaagctagcttttattcccagctctagcgggtaaaagccgacattccgtatgaatttaatggcttgatcgctcaaacaagtcttggcatcgagcccacttggattcatatgggcaatggtttctgctcggttgaccaggatttctaaggtctcatcatccagctctttctgataatagtcaaaaactgcacgaatagctgcgatactgaccgccgcagacgatcccatcccccgtttttccggtaccatggactgaatgcgacagcgaatccgggcctctttaatcccgaggtgctcaagagacgcaaaaactgccatggacaaggtgtcatcttcaaacaaaatccatggactatctgccgggacgatctggcagatcacttcgatatgatggagtggcagcgcaatagccggataaccatagaccaccgcatgctctccaattaagataattttactatgcgcccttccgacgcctatctctttgttcatattcatctcgctctattaaggtcattactattttaatataaatcagtcaaaaaagcgatgcttttgaaggaaatccaacctaagacggagttgagttctatctgacagatagcaaaaggctaggatccatcatcctagccttccatttctatttttcaaattcttgtttgatcaagtccatcaaggagttgcggtctaggatccattgggcccgttcgtccttctcataggtccggttggacaaaaagatcacagcttcctgcctcttgcgattgtacatgatgaaggttccagtatagcccgtatgatccaaccagtcaccctctagattccatccaagagcgcgggtcttgccctcttcacgcgcaaaattctgagacaagtcacgcgcaaaatcatccttcagataatgctctaagaagcgctctagatcagcaacagttgaaaaaagtccagcacttcccgcatgacagcccagaactctcgctttgggatcatgaacacttccagaagcaaggccacggaccgttggcaccgccttttcgaccggtccaaaccgtgtctctgtcatcttccaaggtgtaaagatcagctcttcaaataaacgatccaagggctggtgaaacctgtcttctaaccaaaagcccagcagaagaaaattgacgtcggtgtaatgaaaactcttgtcttctttcaactgcaaattttcaagagctgttttcaactgtctcgcatccaattgatcccggttggggataaaaggatccagcccagaagtatgggtcaagagttcccggatggtcgtcttctcatgagcaaaacgcgggtaaaactctttaaagggacgatcgagcggaagctcccctttcgcatacaaaaaggcacagatggtagcgactccgacgaccttgctgacactggccaaatcatagaccaggtcagccactactgactctcctttttcaggatccgctagtcccagatagtgctcactccactgaccattgaggtaaagcgcaagagaggcacctggatagatgccttcttggatttgttcggtaattttttcgatgattgcattcacgctcatcactccattcttattcttcataagaaatatggacctgatcttgattggcttcaaaccagagttcaatctgacttggatctttggcaatcaagaaagttcccttacggtgcacaaaatcgacagtttctcccaagcgttctttcacgacttccacatcaaaagatgccaattcgaccttgatcatgctcaaatcccaagtcaccttgttctccacttggagatcttctccttgggcttcctgcaaatggataaagtgggccaaagctggcaagttgctatagaacttctcagcctcagcaagatcagccacattgacctcaagaaagtccacatcaaagctggtcaaacctttgaaatcttctggcacgtcaacaagaggcgctttctccaacggttctaggctttcaagattttcttcagcatgcacgaaaatggtatctccttgaggagacacaacttcaaaggcgcgaccattagctccttggtaaagggcgcttgtttctggctggcgggccaacaaataatcaatttcttgagcttgtgccactttcaccacgatgcgacccaatttctttggaccttcgaccttacgcgaacgcatactcggtgactcttctaagacaattttctctacttttgaggcatctcctaaagataggagagctccttcttccactaatactttcattcccaatgtctcttcataaaagcgttgattgacatttcggttattcactttcaagactgggatcactcttacgatctgatttgctgtcatactttcctccaagcactttttattgtaaaagattttctggctttttacaagaaatcttgtgcaaaaaagacagatttttcaaaaataaaaatctgtctttctttttttagtatactgttcgtgtatggacccgcccgtttggagcttcaaattcgtattctaagtaatcctgataggtccctggtgcaatcactccacgcacatctaatacagccgttcctgcctgtcccacaatggaatctgctaacaggcagcaattagtagacagaacaaagtaagatttaaaacgcgaagaagtaaatttatatagctcagcccctaaatcatatttcaatttgtaagcgtaggtcggctgaccgtcttccagtaacctcctaggtggatcccaaggttctaacaactgatcaatttcagctagacgcttctctactgcctgattctcttcttcggtaagggataggctgtagccaaacagcgtcttttgactctcttttttacatagttcgatgtatggttccttatccactttaaacagtacgccatccccaatcgtcccaaatagacgctctgaaaagggatcgtaacttccgtaagaaatgaccttcccctgataacaaatatctacatgcccaatcgctccaaataagttgctgtcagaagtatgaaccaaaatttctaattcccttgcctcttcttcttttttcaccaatcgataagggcctgtgtgtcccgccgagctccctttttgaagaaactggttaaaccgttttaactccttagcagggataaaggctgcaaagataaccggtaggctaatacgaaagcgacgttttaactcttggccttgttggtctttgtcaaataaaataccatctcgaatattagaaatccccaacaagaccagataagcccccaagaggataaattggaagtgcccatctgaaccaggttccaagacagttgctagaccaagcccaccgtttaaaagcgcatcccataaatagagccagcctccttttacccgattggccttataaagccaaaatgtgatcccatagacaatggcactccccaactgatatgcccctaaacaaatcacaactaagtttacgggcagactactcagtcgattcaaccagatcaacgcaagtgaaagaaaaataaaccaaatagagtggctataggaaatagacttgctacgtaacaaaaagcgaagaagaaagcttcctagtccatcaactaaaaagtaaatggctaatagatccaaggaaaatttggtgaaaccaacgccgtttcgaaaaatgagaatcccaaaaatgacggcaagaaccccaaacaataaggtccgtcttcttgcaacttgttcaaaagatatttttttcaatattccttctccttatagacgaaaggtctttagacaaatactattttatcaagtataatataagaagtaaagaaaaaagaaactgataaaaggagcagtctatgaaatacaatcaatatagctatctatctgttgaccaaaaagacattcttaaggaactaaaagaaattgggtttgaccttcccacccacctcccagaaaaagaactgtttgaatggtttgtccgcaaggtttacttcacctataaagatacagattatcccctctctaacctagtggtggattctaaaacagactttttaacgtatatccaatctgactgcgaatggtctccgaacattttttacacagtagccctccaattactcggtttccgctattttattgattttgaagatacggatagcttcttgaaagaagtccaatttccgattgagtatggaaacttggtagaaaacctctatcaccttctcaatactcgaacagtaaaaggaaatttactcatcgatcagttggtcagcgatggcttgattcctgaagataaccagtatcactattttaacggcaagagcctcgcaacctttacgagccatgatgccatccgcgaggtcgtctatgtggaaagtcgggtcgataccgacaaagatggtctgccagacttggtcaaggtcagcattatccgtcctcgctatgaaggcaagattccagctgttatgaccgcaagtccttatcaccaagggaccaacgataaggccagcgacaaggccctctacaatatgaatgtcgacctcgaggtcaaagaacctcataccattcaagtagaagtacctcaattagaattggtggatcctgtcggttcagctgagctagtcgatgaagctgaagaaactctcacccatatcaattccagctataccctcaacgactacctccttccacgcggctacgctaatctctacgtatctggagtggggacaaaagattcacaagggctgatgaccaacggaaattaccaacaaatcgaagcctacaagaacgttatcgactggctcaatggccgttgccgggcctttacagatcatacacgcaaacgtcaagtcaaagctgattggtctaatggaaaggtcgcaaccaccgggatctcttaccttggaaccatgtctaacggccttgcgaccacaggtgtggatggtctagaagtcatcattgcagaggctgggatctcttcttggtacaactactaccgcgaaaatggcctcgtgacaagtcctgggggctatccaggtgaagattttgattcacttgccgaattgacctactcacgcaaccttctaggtggagattatttacaccacaatgtggcccaccaagccgatcttgatcgcgtcaaaaaagagttggaccgcgcttccggagactacaatcaattctggcacgaccgcaattatctcctacatgctgatcgagttaaggctgaggtggtcttcactcatggttcccaagactggaacgtcaaaccgcttcacgtctttaacatgttccaagcccttccagccaacatcaagaaacacctcttctatcacaatggtgcccatgtctatctcaacaactggcagtctattgacttccgtgagagtatgaatgccctcctctctaaaaaattgctgggctatgcttcaagctatgaattgcctactgtcatctggcaggacaatacaggagaacaaagttggacttccttggatgattttggcaatcaaacaagtcagcggaccttcctacttggagacggtgaaaaagtcatccaaaaccgctatgagacaaaagattacgagcgctatggcaaggcttatccgaccttcttaagcgatctctaccaagacaaggcccaacaggtgacgattgatcttccaatcgaagaagacctgcacctcaacgggaaagctcgccttcacctacgacttcactccagcaccaataaaggccttctctcagcccaactcttagagcttggaagcaagaaatacctccaaccctatcctgctgtcttatcggtccgtacgctggataacggtcgctaccatatgctagacaatttgaccgagttgcccttcaaagaagccggccaacgggtaattacaaaaggctatgtcaacctccaaaaccggcatgacctcttagaggttgaggccgtaacaccaggcgagtggatggaatttgactttgatctccaaccaaccatctacaaactcgaaaaaggttcaactcttcgcttggtcctttacacgacggactttgaaatcactgtgcgtgatcaaaccgattaccaactcaccattgacttagcacaatcaagcctccatcttcctgaaatgacagaggcccactagtcgtactctcaaagcttgtcctctctttgcttcatttgacagcttagcctacttatgttactatctaatagagtatttcatagaaaaagatattagaggaagttatggcgattgaaaaaactgtcagcgaaattgctgaaattttaggagtcagccgccaggcggtcaataaccgtgtcaaggcgctggctccagaagatacccaaaaaaacgaaaaaggggttaccgttgtaacccgtagtggcttgatcaagctcgaagaaatctacaaaaaaactatttttgaagatgagccagtcagcgatgatgtgaagcaacgcgaattgatggaaattttggttgatgaaaaaaatgctgaaatcgtccgtctctacgagcaactcaaagccaaagacgagcaactcgctaagaaagatgaacagttgcgcgtgaaagacgttcaaattgctgaaaaagacaagcaattggaccaacaacaacaattgactttacaagcaatgaacgaccgcgataccttgaaacttgaactcgaacaagccaacgaaaaagttcaagagcaagaaagcaaaggtttctgggcacgcgttttccgtcgataatccggggctggatcctaccagtcccttttcttttctaccacaggagatttcccatgaaagcattagaagattatatcgccttcgatctcgaatttaaccaatacgaaggggcctatcagattatccaggtgtctgccgtgcgttttacggacggtaaagaagtcgatcactacgactcctacgtctacaccgataagcccctaaaaagctttattaacggcttgactggcattacccaggacaagatccaaaatgcccctcaactcgagcaggtcctcagtgaattcaaggcctttgtaggagaccggcccttgatcggatacaatgccaaaaagagcgacctacccatcctacttgaaaatggcttggatctagaagaccagtacgctgtcgatgtctttgacgaggctttcgaacgtcgtccatctgacctccacggcattaaaaatctccaactccacaccgttgcagaatttttgggggtagcaggaaaatcacacgatagcttagaagacgcccgcatgacagctcttgtctacgaacaattcctcgaatttgatcaaggccgcaccctccttgaagaacaagagaacttctccaccaaccccttcggaggcttggacttatccggattttttgatgaataaaaagagagagtgggacagaaatcggtaattcgttagaattcgatttcgtcgtcccacctccgcacagttgagtagggctgtaaaagctgaagaaatcagcgtagtagagcccactcaaccactgcgtctggctcaacaatccaaaaacaattaagaggctaggacttttgtcccagcctcttttgaattaatgaaaacttctttagcttaaaatggtaatttccctgcgaaagcaccgagttttttcttggttgccgcatcaatttcttcaatggcagcattgatggcttgcaccgtcatatcagaaagagtttctgtatcttctgggtcgaccactgcagcattgaaatcgatggaaacaaccttcttatcacctgtaagagttgcaacaaccaagtcttgagcagatttccctacaaattgagttgcggctaattctgcttggctttgctccatttgcttttgcaatttttgagcttgcttcatcatattttgcatattcatcataatgttttctagattcctttcctatcaagggtttagaccctattgcttaattttcactgcccacttctgcccatttttttaaaaatcgtcaaatgcgttagcgacttctttttgttgtgatgggaacaaatgtgagtagatatttattgttgtattgatagaactatgtcctagtcgtttcatcagtgtgaaaaagatataatcctttccttctcctctcctcaatccctgatttatcaaaaaggctacatgcgaatgcctaaaatcatggtttcggatcaatttgaaatcttctggcaatcttttcttgaatgacgctctaaagttagagacattcggagcagtcataggttcccctgaaaattggaaaatctgcaaatcatctgttgaatcagtgagcttagacagcctctgactttgtactgacttccagtttttcaactcattcacaaaagctttatggatgtagatttctctatttgattgagttgtctttacagatccaatatgtgttttcccattgcgataataggctgacttacggattttaatatatccctcgtcaagaaaaacatctctccaagtcaaggcaagtgcctctcccatacgaattcccgtaaacatgagtacacgatatagaagtttaaaaggatattcactttcttcgaaataggactcaaactccttgaattgttcaggagtatagtaggacatttctttatgcttttctggaagtttccgaatagcatcacatggattatcctgtctgaatcctttcgaaatagcaatatcaaacaacttatgaacaaaaatcatttgttgattaatatgcgttgctgtaagtgtgccaccttttacactaggcttttcaattaaccaatctcgatatttttttacatcttgaatggtaactgaagacatatcagcattttcaaagaatcgcgatacatattgggtatagtatgagttctgagtatctattgtccctcttttatttccacgaagctcatcttcttcttttaacattacataaagagaggaaatggtgagtttttttgtattctgtatctgatttaacttatggatacggtaataagcctcatattcctctgcttcttttttcgttaaaaaattagatttgcggtgtcgtatacgtttgccagttaaggaacttttaccatcactaatatcaactagccacagtccatcgtcctgttttattaccgccatgctatttttctccttcagtcatgacagcgctttgaaggttcccctcaattatatcattttttaattgtatttgaaaaccaagaatggattcaactgtaataattggtacacgtccaatacgtttatttttataccattcaaatccttcttgtacaagctggctctttgcttttcgtattaatttactagcttgagtttcggaatatccaatcaattccattaaatcatttttatctacaacttgaatcatatatctattcctttctaatgtcctataacataggtaaattgtttggcagtttctgcgtcaaaagtacggtaactaatgatccctaacccttttacattacactctgagacaagaattgaaccatctgatttgacttgctccacaaatgaaatatgtccgtatattggatcagctccagcttggccagggataaatgatagagcagagtgttctgttggtgtatgggttgttgtgaatcctggcttattcatccattgtccgccatttcccataaatggatcaaagttgactccgacttgttttccacggttgaagacataccaggtacattgtccccaaggataagtactagtgatatatcctgtggtatcaatagctgttgtcaaactataacctacaggtatatcatttgaagttactcctccaccatctctagtttttcctgtcgtttgttcaggagcttttggtgttcctccatgttcatcaatgaaggcatccagtttttgcatggtttctgcacgtctttttcccgatcctgtagtatctgtgaaatagaccccgccatcagttgctggattgagtgttccattcgcaaactttttagctttgtcatcttgaattttgaaggtttggtttttatttccaatgatagtttgttgggttagtccgacaaccgcaacctcatcattaaagttattggcatattctggattggagtcataggccccaaagccaaacatattggctccaggattagtggctactccagcagttccaagggagctttcattcagtgcgatcgcaacgattccacggacatcaagatttgatttagcttcccattcgaggagctttttcccattaattcggttcttatcataggagattcctaacgtatctaaaaagccgtctaattgctctgctgtaataccgaagcgatgaaccagtaggttgtgagtatagggatctccatctgaccagtgatccgcataagtcactccattttgggattggggtgagccattcgttccaccacctccgacagcccccataagaataatgataatgaggactggaagaaagagaggaataagaccagctaatagaaaccattttagttttttcatcgaatctcctttctagttaatgtcttatataagcagtgaacagaacagtcccaaaacgccatttagcatctaaaacgactgaataggacttaacctgtaggatgatttggtctcgctcttgttctgtgactggaaacaaaagaaggaaatcgactgagcgttttccttcttggtaggcctgataaagagtttcttcaagaactcttagaaaagaagttcttgagcgtattttggtattcatatcattctcctctgagttgttttaagcgttctgttaatcggtctcttcgttcaatattggctctcaatttatcatctcgtgtcatggtctttctgtaagcacgagtgaaagcattcgatccttgagctttatacatggcttgagggtctttatattcctctaatttgcgctcaatactattaatgcggagttgtttaaatggagaaatccattcttctttaagagtttggaattcctcgtttgaacttggtgttggctccactgtgattggggattccattgaaggagttggtgttttttcttcaattggtttaatcccctcaagtgttgcctttgttttcggaatgcttggttcaggggtatctggatttgttggcatctcaggtgtttccgttgggagcacttcatcgtgctggtgctctgattccttattggtaaagaaagaaccaacattttggaagtgactcttggtattcatcatcattccagcgccaaacccagcacctgctaaggcaaagtttccaaggtgttgagcagatgaaaggcttcttgatggtacttgtgaagccatctctctggtctttgtgacccctttttcaactttgtttccaatatcattcgcaaccattcgtgctttcgatccaagaatgaattggatcaactcagctttgtatttccatagaaggaagtatacaagtccttttgatacaactgaaatgagtagtttaaagacaaggccgaagatgatcagggatggaagagttttaagaatgccatcaaagcctgtaatgacgatattttcaatcattttctcaatgtagaagactaaaagcgttaatagacttgtgatagctgggaaaagcaatccaccaaacatgactttcaagactccaaaaatcagatcctgcattcttggtacaaaggacattagaagtacaattggaaagagcaggatcatcatcaggacgagtgtctgagcaataacgtttaacatttgaatcaaaataactggtatcgctaatacaaaggcttcacagattttgaagatgacataaaacatacgagtaaagatgaagtcaggcatagctgaaacccaacggttcttttcactatcatcattggctccatttcctagttcatctagatatttattacgatctttcgatttgacagctttaaagtttccatttttatcgcctgttcctaataccttactatcgtcaaaagtctcttgtttcccatcttgactattcttatatttcccattttcttgacctgtattgacaaagacataggctttataagaagtttctgcaatatagctatctgccatggaatcgccaattttaatggatttattattgccatactctaccttgatatttgtgatatttttagtgacatcttgggaaacatggttaatggtatctagtagatacagaccacctgaagttccagcaattgtcccaaaataaccaaagccaaggatgagaactagaaagacatgaaggagagttcttgaaaaagctcctttcgaaaagaaaaactgataaaagagatagaaggctagaatcagaagcaacattgaaacgagtgattgttttgcgactccaccagagcttgaaccaatgaatcctttccagatgttcattgctccattaaatacatagttcttgtagttggagtaaagatcaatcttttcgagaattcgaatcagcaaagaaaagaagcccaccactgcgtttagaatgaaaaagaagaagttgacgaaaagctcattaatcagaacccaagccccgttaaaggaagcgaacccagtaggctccatgtaagacttgagagagaagatatcaactccccttagtttgtcaaaagcttcttgcatgggttcacctcctaactagcgtatttattttcaaggcttgatgataccgtagctttcattggttttagaagcatatcaatttcttcaaagatgttgtgtacggaaatcatattgagattgccatacacgtcatagtataggcattgaccagagatcatattgtcaatccattcgagattgctttcagtgacttcgagattgacatgttttaagatatcttctcgttcagacttttcatagaaagcaaagatagtcccaaatcccgttgtatcatcgtcattttctgcatcatgtacagattgagtaatcagtgccaaggtattgtttttggagcgtccaatccgacgcatatttttgataacggcttttccttctgcggacttcataagaatccatgcttcatcaaagaactcaatagtatcttcattttcatttcgttctccaaagtgagtacagaaagcacccagcgcaaacatgagggtaatagagttgcgttcgtgatctgaaatctttgtggaatcgtcttttggtagcttgaggttattgacctcaaggatggtcactcgtgattcatagttaagtcctcgagtagtcccatctgaaaaggctagttccaagatagagtttgtgacaattgaggtcagataacgaccaaccgaagcaatttcagaggaagtagagtctctcagaacttttaggacgtgtttaaatccgactttctcaccagcgactcgtttttctacaatcgcattaatagcttctgtgatcgctgttttctggtccattgtgacatcatctacagcttgtagtagaaactcaagcatattctttgcgacctctacagcttgttctttatctagaacgacaataggatctaagactccgtggtttgatggaagcgagctatctagtgtcacaaagttaaagttctcaatctgtttcttgcgttcaggatagagatgtgcaaattcaggtgagttgatcacttcttgatagtgatttctaagttcacgtttagggtcaatataaagggttttaacattttgtaaagccacacttaaaaagatgatctgagcaaggaaggattttccttgacctgttgcccccgtaataatgatgtgtgggttcttggtaatctttccagcgatatcttctttatttcctactgtcgcattgtagagaacaatgttctttgaggaatcaatagcttttgcaatattgtcccaacggcctgtccagttatctactcggccgatataccaaccgatacggtttccagaagaggtattggtaaaaggcatgagttctgaaaagccacgagctgtgaccatatgtgtccaggtgcgagatttcttttggaggttttctccataaagcagagcttgaaagagataaggtccgtcttgagaggcttcactaatttcgactcccatatcatcaaagtagttcaaaaccacttgtcgtctttgacggagctgattcacacttgaagcagagataatcagataggctccatattcgatgatatcttccttgtttccgactttcttcattaagtcctttagggagatggaacccataatgatctcatcttgttggacagtatcggtgttttctgcctcttccatgatgtttctgtaacgtgtattcgatcgtcccattcgtcccttgatcttgttggtatcaatgaattctgccttgattcgtagctcaacgggaaagtttaagcgttggataaattcgccaagatgaaaaccattgaattgaacaggaaatttaccaaccggaagaatagtcacaaaagaagatccataagggctttctagcttaagaaagccaccttttaggactttgatcaaggtatctgtgatattgaattgagcacgattagcgagcacctccttcttgtagtgagggatatagcgaaggtactgcatccgctggtaataaaagagttcttcattagataaccgttttgcccgaaggacagagaaggcttgaaaaatagtgaattcatcacttttatagtcttcataccaagtgggacttaattcatattcatagccgaggccttttgcgattttttcagtgagttcattaaagctctcataggccaagtctttgacggtagctccgtgattttgtttgcgcaaggtcactccaacgacccagtcaaactgataaggaatttccatttcatccgttagacgatccaccgtgtaaagaagaagttcttctcctagttctcggctgtcatctgctagagcatctgaaaagtcccgcattttctcctctaaaagatagtctttaggaatcagagatatttcaaagaacttgtttttctggagcttcttcatcatttgagcaacagtgattttgtgtttgccctttttttcatcatccgtaatcgtgataggagtgtttggaatacgataataagcaacgacggtttgatcttttttgagagctaggttttcatgtgtttccctaataggataggttaaagtaatactcataggtcctccttttctatagatttgttttttcaaagacaatttcttctacaggctctatccgatcttcatggtagatagcttttttattgatcttaaagtcccaaaagtaaatcaggtaatctccaataaagacgtgcatcttcttaccgtgaggctcatattccgtatagaatttggccaatttgtaagggagataccaatagagcaagagagaaattgaatgagtgatttttgcgagtggcacaaagataaatcctccaaagagtaacatggccacaaagacgatgataaaaacaatgaaaaaggacaactgcataggtgttgcaaagtaccatagtcgagtgcccttttttgtcttaatttcttggatccaataaggagcatttaggcccttactgtaatcataaagtctttcttcattcatacttagagtcctgattcaataccaaagagtcgaaggaaccagccgactgcttttaggatatcttgtcctttggcaatcgaaacaataacggcatagaaaccaacgactgaaaagagttgaagccaagagctattccgccaagctttaatagctaataaaacagctatagcggtgagaatccaaattccatcgccctggaggaaggttcgtagattgtttgtattcatagagttctcctattctttatcatttgcatagtttagtggaatggtgtgttctagttttgtgacatagtaggtcttttctttttctgagagagtaaaggtgaagttttctgagtgagtggtgcctccaacttcaaaagtagcttggacataagcgattagatcatcaccgtcctgtttaagataggtgtagtcgatcgttttgaaagtgctatttgcgatgatattcacatttttagcaatcagattaagattatcttggcttgtggtgtagttggtaaagaagaccttgaggaatttctctactttcttacgctgaccatctgaaaagtggtcgttagcggttagttggagctgatcgtcttcgctaaagtggccagcttgtgaggattcaatagcagagaaccaaggaaggccggagatatagtatttcccatctttttcatcaaatggaatattgaaacctgtcacgatttctttttcttctgtgttattatcccgacggatcgtttccttgtatttgatcttataggtcgcaacttttccttctacagttactaattgagagtagagaagttcactaggatttcgaacttggccctgtgctttcacatcaggaatgaagttataaaaactatttaagtattccacttgagcttgttgtttatccccttcttgcgggagggtgaagtaagcatagacatagtcgttcaagtagtactggagcttgtagtcgtattttctactcgactccattggctgtgccttttgttttttagtagcctccacttgagcttgtagtgttcctaccttatttgagagtgtgatagcacgaagagatcccaagaaaccaacaaaaaggaggaaagaaattcctcctatgactgcgatattgacggtctttttattggtgacttttagttttggtggacctccttttttctctacctttttaaagtgtgagagatattcttttgcttgaagcaagtagcgtttggctttatccatagatcctccttttagagaccagcaagttcaatgagctttgagccttttgcatagaggcgcttattggctttttcgatttcgccattaatataatagtagcctcgtagctcagtttggagttgttcaatcaggtcaggttttaggtctttggcttcttcttttttaaggagactatttaattctccagccttggtccaagcctctctatgatctttctttttcagtaattctcccagttcatttgttacttgagagactttcttttcaaaaatagttttagtagccatttcaatttcctttctaaatgtttcttgattgtctttgatggtcttttggatataagtaatgagtgaggggcgcatttttttatttacgctcaacacttggccatctagtgtgaaacaggcatgttcatagttatagaaccctctactatctggaagatcttctgtacatctgcctgcacattcgtagtagaagtcctttccttttcgtaagaggatatacatattccagaattcatgttctggaagaagcagaaaatctgcttgataaatcttcttcagcatcttaagaagcctcaagcagatcatcgtaacctagagcttggtagataaaatctgaatcaaaccagagccagtcattgatttgtacttctgtcggtgtattcccagagaagatatcctcacaaatgacggttagagtatctactccaccacgttcacggacagtgttcaaggtggttagtccaccagaccaggctttaaagttgtctagtgaattgatttgaactttgtattccatatagtttttcctttctagtgttcatagtgtttattggctttgagaagtcgtaacatggcttttcctcgatcagtaatctctccgctattctgaatcattttcatgtattctgtttggaggatcttgtctgcttcagtgactagtgcaagagagttagcaacttgataggtcaaccagcgaatcgttcgctcaatactgtatggttgtgggttggttgagagttttaagggttcgacacccccaaagagtttttgccatttttcatcaggtttataggctccaaagcgagtaactccatcatagacttggatttctttgtttatgatgcctcgtgcgatttctccgaggtctacaccattaatgtattcctccacaatgccttgagctttctgatctgaaaaacgcaattcatagcgattccagataccaaaaatctccaaggattcgtccaaggagatgttttccattcgagctatttcatagcgcttttcataaaagttgaagtagagttgactttgacggcttccaaagtaaatggacaaaccgtgattcgcttccatgtcttcattatctgtgaatgatcctccacccgtgatattccatttcttgatcgtgtctagaacaatctctttggaatagagtttatcaattagtttgggaatttgaatttgttcatcctcgtgaccgtagcctttatagagttcatctagagcgatatcgagacgcttcacccgaacatcttcataggaataaagaatgttttgaagaaaaatctgccaagtaattcccttatcttctagaagcaattccagctcacggcatccttgaccagatagttgaaggcaagtttggtagtcatttgtcacagacttatcaaagaaatcaaaaatccagatgttccctcgttgccataagtgggtatagttcatgagacgagtttcttggtctgtaaattcgcttaagtgacagtgaaggaagttttcgcagaacgcatctagatcctttaatctaggaaaggataaacgtagatagtcgatctgagcccgaagactgtttttatcgcaatcttgataataaccgagcctttcttttagttctctgaacttatcaatcgtcagtcctctttcgcctgtttcataagaacggtaggttctagtcggaagatcaacagcttgtgcaaatgctttttgactaagtcctgtttgttttctgaaattcttaatatgaaaaggactaattttgtccattcatcgcaacacctctttctaacaaagtgacacacttttttgacgaaagtgacacactttataaaaattgaaaacccaactcccataaggaatgaggaggggtggacttggcgtttttgccaaatgtaacccccctattagaaaacgggggttgaagtttcatcatggcctagagacttcgggctacggtctgcgcctgacctgcggtcaggcttgcccttgcccttgtcctagcccatgatgaacaatcgtcgcttcaactgcttttggataagatctgcgtcctccctcttcaaattgagcgaggatttcaagaagaagtttttcttgaaaaggatccactagaatagcggatacagtccgttcaaagatgatcccttgctctgttaagagatagataatcttgcgtaaggttggcattttaagattttgttcgtccgcaaattccttgagtggtcgcttgtttggttcgttttctgttacctcctcttcctctataggatcaattgtttcaattgatggtttgtattcttcaaatactgagaactcctctccttcaaattccataataggaattttagagtaggcatcgtagaaggaaaatccttgatcaagcggtacatagggagagaaaaactcaccagccagctcgccattgtttgcgatatacccccgtcctttgaccttgactccattgatttcatccaactttttaaactctttagttttattggcatctccaaacatcatgtcatatcctgttgattctaaatgaccgacggagagacgcttcataaagttatcccgaagagcagttttaataaattcaccatcgggccgttgcatagcaaaaatgataaagactccagcttgacgaccttctaaaactaactgtgagagatattccatgagttcagactgttggctatagtcacggtcaatctttgccatgagagctgcccactcgtctactagaatgaattttggtttcatgtcataatgagtaaagttttttccagcttggaattttggcgaactattcatcaattcatatcgtttttccatgaactctacattctctttaaaacagttaatgatatcttccttacttgtatagactcgaccatggaagactggaattttctttaatccagctagatccgaattctttggatcacagatatcaacaaagccaattttagctaatgcataaattatggtcatgagaacaactgtttttcctccaccagttccaccaccgatgagaagatgaggttcttcaatataatcccaagatacatctttcatgagctggagctttgatcccttgacttttacttcatcgatggtgatacggctatcaatccgattaatagcaatttcatacttgataaagcggttatcaaaggttttattgcgaaagtctccgttaaacatgacttcaagcgtagctccaaggtttaaaaagcgatcttggaacttattgccctccaaaataaaactcacttcaatcttgtagcgagactgcttgatatacacttgaggcaaggtgattttttcaatgatcttgttttcacgtctaacctttttaacgagatagaggttattctcaagcaaaaaacgagaaagaattcgaaggctgtttagcttttgaaaaaagagcattttcttgtagcaaactcgattgataaaccaagaaagaatcaatgaaaaaagtagcccagcacctagaaaatatccttgaggtaagggatgaacttttaattcttcaatatgtaagtagctgtagtaactaatagccaataaaaaagggaaccaccagataagccatgtgattccctttagttttcgatgaaaagcgtgaactcttttcccccgataggtaaagagtttcatagtgcatcacctcctagttttccttcttgttttctactggtttgttttctttggttggtgcacctccagcttttttcttaattttagaagcaaagagcttatagatgtcattacgattgacgtgggtatgtgtgataacaatatcttctagttcaacttcttctcggtatttaatgcccaagtcttcaatttcagactctgacatatctgcgatagtgaaaaagagggtttcgtgctggacagaagaatgaatccctacgacaattccacggatctcacctgtattgacttggacaaatgatccatcaggatttcgttgtgagcgatccacttcaaagatgatatcagggccctcaatgcctcggaaagacagttttccaaggacagctgggacatctagtccatctgtaatgacacgataagtcttgtcagcaatttgtagtttttctccgtagtttaatccaattttagccatgtgattttctccttttatttcttattttttaagtaccaatttttcagcaaagacattgagataaggtgcaacagtattgccatttaaagcagtgtctgggaaaaagattgggttaaccgcttctactagagcatcttctgggaagactgttgtagaggctggtgtgatgacatgaaaggcaccatgctctgcgctgtttagaatgtggcgttggtattttccttcttttccaaaaataaatttaggagcatttcccaaacgttcgtagtaagcagggccaataaattctggtttcattttaagtgtatctgagatcataagattttcctttctgagtgtaaaataaaaagagttaagctagttgctccactcttgagtaatagtgtgtaaaaagtttgcgtttaaacatacgactatagaattgaatatccccatgagcatagccatttctacgagcagcatctgcgagatggtctaaatcaatttgagcttgagcatagagtttcgcctgtagtttatcagattcactaaacataccataggtaaattcatagttatcatagagtcgtttacattgtagtgcgaaaaaagtttgtcatatttttctcctttattgtaaaagtaaaaaagctactaagtgaaaaaaggaaataacttagtagcttgagagtaggtctatcttattagatagacagcagtaaagaaaagttatttggttggaaagatccctctttccacggtggcaacgtttagcaaggtgctttgcatcaattaccatcgctttcccagccaatctcttcaggtagtcataatcatacccaagggattctcttacgccctttggcgaagccagttcactttactattcggaaaagtgcgaaagtccgaaatgcgtggaagcccacaaataaatgttttctatcttcacttcaaccataaaatggacttgactttacctatcaaatatattacaataaagttgctaagttaattgtgtgatttgataatcagtcctctggttgtcagacgcactttttatttaattgtcaatgatcataatgccgatagttaggtgttattatttttaaaccctatataaccatcagctatatttatattatataaccaatggttatatttgtcaagggattattttaaaaagttaaaactatttttagaggtctaaaatggaattttcggaacgcttaaaaaaacttaggaaagacgcgggtttgactcaagttgatgtggcagaaaaattaggaatttcgcaaccagcatatgcatcatgggaacgtggaataaaaaaaccaacccaagaaaatttggtgaaattatctaaaattttatatgtttcagttgattacttattaggaaacacagaaaaccaacaaactagtgatgctttagatgatattgaactactttttcgtatgaattcaaaaggtctaactgatgaagaaaagactattttcaaaaaagaattgattgagtttatgaaaaaaaggaaaaaggcttttactaatagacaaaaagatagagaatattaaaaagtgaggtatatatgtttcaaataatttcagtttttcttacattgattttactttatggatatttaaaatataaagaaaaagcaaaaaagaaatattcaggttccatagttttcgaaataattgatcgggaatacagtaattggtataagaaaaaacggaatgggatagttataaataaaaaaacagcttctatgtttgaagttgataaagtagttttcaaattaaaggaaaaatttgaagatcaaggtgtttcaaaagaacagcttaaggactatctagattttctatataatgacgagcctaaaaaggtaggtttttattctattataatatccgtctttggatattttggtatagataaattaaaaggtttatttcctcaattaaataatatcacggatatatcaatggtatctaaggatattgctgatacatttaatataaatagtaaatttgcgttaattgttttatatcttttattttttatagggattctagtattgttattttatatttcttataaattagcaacaatggataacatgtatatagatacccaaaagatatatgtcttaaaaagagccgaaaaaatatgggattttgaaaaagatgatagtgtacttacaattacagatgcaagagataaatttaaagttagaaataatttaattttccctaaacttaaatatagtaaatcaaaaatcgaggaagattttgatcgtgctattggagatacttttaataataataacgaatactttaaaaacttgccaggtattaataagattaagtggcagggcattaaagaatggctctttggaatgtcactacctgtttttcttataataatcatttttatattatgtcatttgatggtattttataagggccaactacctgatatattgatttacgcaattttctttctaacactttttgtaatatattgttttatgcttatttatctcacgcaaatagataagcaaaataaattaattgataaagtacaaacgagtgtagccaattcggagcagactgaatcagaattacaaactgaagcagatgattcagaacaaactgaatcggaatcccaaactaaagcaagtgatacagaacattcaaattctagtaaagcaaaaagaaagataaaatatagacattacaacaataaacgtatatacttctctctttttataactttacttattcattatattttatgtttaatacttataaacgactggacaaatatcaatcttagtccttgctatttaattgataatatttctcctctttttaaagtacaattgcctattttatttttacgcattccaatcataattagctttgcagtaacattcttttctacatttttccaaattaaaagtgacaataattaagagtaaaattgaataggtagtatttgtattgatttgatcggagatttactatgtcacatgttcgattacacaatccaattattttgcatacgagttttcagtaaaatgattgggtaatatattatttttactttagatttaaataaaatttattaagacctaagttggataataaatataaagacgataagaatattagtttttctttttctctatttttagaaaataaacgatttgataaaaatagagagaaagaaattacaaatataaaataatttacgacaatagagatatgatgttaattattttttaatctctataattttaagtggacaatcgtccactttttttatacaattaactaaacccgtttggtttagttttttgtaaattttacttaaaggaggtgtcgttctttggaggaattgtatgcaagaataagtaagtctacaaaacatgtgttataccagtatatgaaagatcatgatatttcattactaaactataatttcaattacttctttcaacattgtattcagaaatataagattcaagtaattagtcaccacttctcaaatcacaagattgaaggattaactgttattgatgaattaggtattagtttttcttatgaaaaggataatcccattgtgaagcaaaattttacgctgtgtcatgagctaggacattttatcctagagcatgaaggtaattattttgcagaatctattgataatcaggagaacctactagagcgtgaagcgaatattttttctgctgtagtattaatgcctgacattgttttgttgtcaaagatttattatagttgcgacacctttcaacacattcaaagtagcctcgatgtctcaaaacaggcattgttctttcgccttttagatcttcttagagaatattatcctgaaaaagaaaataccattaggcaggctatcgatgcttatattgatggacaaaatgccacactactccttttgtttcacggtgtcaaagatcagattataaaggaattcaacaactatcagacttctctaatcaataagattgagcaatcagtaattaaaaaaggcttcgttactagccaagagttacctgaacttttaaatcaggataattggaagacaattaagaattgtcatgacaatctaaaagtatggctcatctatgataaaggaaaatctatagcttatgtttgggataaaaataagctaacagacaaagaagcaaaacaaaaagctgaattgaaactactgttaatgtgaggtaagtgatgtatcaaccagaaaaactaaaggctcgaagaaaagagctaaaaatgactcaaaaagatattgctgatcagttgggagtcagctatcaagcctattccgcatgggaacgtggagtaaaacaaccatctagagaaaaagtgcaacaactagagcagattctaaacgtaccgaaaggtttttttacagagatcgaaatcgtccgactatataatactttatcggatgaaggtaagaataatgcacttagttatgtcagaggcctagttcaaaaagaaaaatgtaagaacattgtttcaatgtcagaaaaactatacgaataccatgtttacgaacaaatgtctgctggtatcggttcatcggtgtataacgatcaaaactatgatactgtctattttgatgaagaactagcccacgatttcgcctcatggatttctggtgactcaatggaacccaaatatcaaaatggttctgtggctctcattcgtgagacaggatttgattatgatggtgcagtttatgccgtagtctgcaacaatcagacatacattaaaagagtttatcaggaagaacagggcttacggttagtttctatcaatccaaaatatcgagatatttttctttcgtatgatgaagatcctagaattgtagggattattgtagggaatttcttgcctgttgaacagtgatattgttaatgtaaaataataatagtgtattattttttctagacagggtataagtggaagaaaagatgaataaaatggagaagactctaatggttcttctccatttttttatctaattggtaatgttgaaaatcggaagtgaaatgatactttcaaagaattcattttggacactagcaaacgaaatagagccctgatgcaaatcaacaatttgttttgaaatttttagcccaattccagtcgttctaatttaggatactgactacgtcagttccatttcaaccttaaaacagtgttttgagcaacctgcggctagtttactagtttgctctttgattttcattgagtataaataaaaatatgagttctcctcttattttaaaaaataattatttcataatttttttatatttagtgtaaactattcagtgcgtcccaaatacgggaggtttgtttctgattttcatatttggattataatattctcatcagagttacttaaggagtaagatatgaaccagattatgaaacaatataaattactatatttcttgattattttattaagtctgacaagtgctcttttaatgacattcttctctctccaattaggaagaatacttgatagtatatctaattcaaatagtggattactctttcatatcactatttgtgtaagttcgattttactgtggttcttgatttcttgttcctattcctatcttaaaaaccaatatgtaaaaaaagttattttagatctaaaaaggcgtctcttattacattatttatcgcgtgaatttaaccaaattgacaaccgtaaccattcagatttcttaaataatatcaccaaaaacagtgatcttattcaagaaaatttattaatccctaaaatctctctaattgcaaatttagggagccttatcatgagtgtggttgctattatctatatagaatggcgattagcattagtctttcttttattgtcgagtataacggttttcctatcacaaattcctggaaagttaatgactaaagcaactaataattattccctacaaaataatcactatttatcaaaaatgacaaactttattgatggttttgaacaaattaagttattaaatattcaaagctggacccaagaaaaaattcagggaatcagtttagaatttgaagagtccagaaaaacatatcaattcttaaaagacttagcttcaactactggaattttactaagttttggctctcaactatcctgtatggtcgctggtatcttttttgtaagaaataacttactgactattggattactcgtagcaagtattcaattattaaacggtgtttttgttccattacaatctattctttacaataaaaatttaatcagcagtagcaagtccattattgataatatccaagaaaatctatatgagacaaatcatggaactttccataaaacaagtacaattgattgtgataacatttcgaccatttctattagccaattacattatgaaattgaaaataaaatattatttgatcatttttcctatgaatttaaaaaaggcaagcgctatgcaattatcggtgcttcaggagctgggaaaacaactttagtaaaattaatactaaactattattccaaaaatctttatgatggggaaataaaaatcaacggaaaacagaatattgatattccctcagaggagttatataaagatattgcatttgtgcaaaaaaatgattttctgattgaaggaaatgtcctagagaatatcaaactatccagaaatctttatttaactgaaaaattaagaaaagccttaggatttaatgaaggcttccttaaaaagagtctatctcaatcaggcaaaagcatttcagaaggagaaaagcaacgaattgatttagctaggtttttagtcaaaccatattctgtatatatctttgacgaacctacaagcaaccttgatccaataaaagctaaagcaatgatggactacattctatccattaaagatgcaattgttattgtcattactcatgatcaaaatccaaaaatattggaagagtttgatcacgttattaccttatagataaatggcctagtctactaaatgaatgatgtgtttctcaaagtattctttgtaatttttgtagattgttttattgaagagttcgaaaatttttaaagcttcttcgatttttaaaagtgatttttgattatgatagaatttcagttccaaatatccatctaaatacagcaaaatagtttgttcaaaaaaatctgtggaatccgctaatatattcttcgtagcctgttttaaaaataaagattcctcatataagtcgttttcaatcattataatcaaagaattgagaagtagttgaatgagagattgtctatttctaggtatagaactatacaatttcccttttttgagcgcctctttggcatatctaaataataaatctggagatagaacacgacagcaatttccaaggatgagcgtttcgtaataaccccagttttcaacagaaaataaatagtttgtaagataagaggcgtcttgacgactcaattgatgattcttatccattcccgaaacaatactttcaatgaaaatagcatttaatttatggtaatgagaatttgtcctatgaaaaagttctatttctttctctaccatatctagtaatgcttgagaatcttcattatatgcggcctgtttaacagaagctattaaggtattaaaatccgaaggttgataatgattacagataagcagaaattcctctagtgttactcctattctttcaagaagatacaataacttaaagacagaaatctctgtttctcctaattcaaatctagatatttgagattttgaaatttcagcacctgctaatgaagaaatagaaattcccttttcttctcttattttcctataagtttcacctaaaatcatatttatctccatttaccataaaaaatcattagaaagcgtaacagattatgaaaaaatactatcaaatctttttattattattatttgatattatcattattattggattatatcaataaaattaatgagtgtgtgaaaattcaatactaggagaaaatgaaataaatatttccacaataaaaagtatgatatcaagttttttggaaagcctctgtttgtaaattattttaactcacagttgatgattccacaaattgaaaagttttaaacttagcatttaaacgctcaattttaatacgtattacaactatctctattaaacttcttatcctctacagtcgatacatgctttttagaactttttaaaggaaaaaagatatctcatgaatattcatagtatctaaataacaaaaacaagtaattgctctgacaaacttgacctatactttctttaaaaagagtaaaatcatgtgtatgaccgtctcaaaaaactaattgacaggcacgaagtgtcgttaaatcgattatgattgtgtctttatggtgtatatctttttccaggataattcttactttggtttcttttaggacattgaaataggactttctgtgacatcaatagctatagtgacacttgttaattttaagttttctaagtcaaatagacttgaggaatgaagagtgtattctacgaatgttaatgttcactagtccaagaccaaaatcaaaaaactagaagatgttgagttgattaatagcataaataatgcaagttcagaattaactgtttttctagacttaaagtttttgtgcctcctcctttacagtgtttggatttataagttgtatctagacaggatatctttgttgggaaggtatcctttttgacactaataaataatttaaagttctcaggagttagttgcatggtttttcgtaaatagttttcttaactatagtatagcatagtacagtatggcactttattttttccaataagtctattataccccaaggacagctggttttaattttttctctgaactgtacgattttgcgccagaaatgtaggaattacctttcgttgtgatgtgataaaacttacaaatcttttttgttattcttgacctagttttttagaaagaaggtctaagatgttaaataaagtcaaaactaaagccttaattagtgttggagcagtggctgcaactagctttattctctgaatcttgcatgataagaagaataaagaaataaaaagaaaaatcaaagtgtttgtttatcggcaatcatcacaattcggttttttaaaataggatggtatattttgtttctttgaccaaactatgaccaaaatttgaacaaaaaatagatttgactttcggttaataataagcttaaaagttttttgaaggaatctatttagcacaaaaaaacacctattcgagaaaataggtgtgaatgatgttatttatatccatattgttttagtgcgttattatattcttcgctatctttaagatagtagtcgtgcttaactccactaatatcaacagaaaagaccccatctttaaacgaatatccttctgtcctttttgcaatatcttgtccagttaactcaatggttttcttttgtttatcaatcttaaagttatcggcttctccatgttcaatgaaacctttatcaccttttatagtgaatgccagctcgtttctttcacttgatatccaatagtattcgccatccagagattgttgcttatttttagtgcaagcaattagcgtaattattgataatgacaacaataatatgctaacaatttttctcatgtttctcgcctccttttataatattactataccaaaataatgttacaaaactgtatcaatgtctgttataatggaaatttcaaataatgtccattataacagacattagtaaattatagaaaaagatctatatttggctatagttttactaaatctctacgactatagattaaaaatgtatacacttctattttacaagttcaacttaagaaaatcccaattacaaccatttaacaagtaatataaaaagagttcaattgtcaatcccttttttagataaagaaaataataatggtgctaattaggattaatacctaaataagttttaattttcttttcaagaaaatcaatatgttggttaatttcagtttgttgcttatgaagttcatcaagttgaaaaaatagtagtctaagtcgttgaggaattgtggagtctcctttatatcttaggtcagcgtattcttgcatatttttaatagacattcccgtcttttttaatctaataatgaatttagcccacgctatatcagagtcatcatagtatctacgattattttcttctctgtgtgagtaaatcaatttttcttgctcatagtatcgaagtgtgggaataggaagtccagtttttttagcaaattctccaatagaatagtaagccataatatttcccccctttattttttattattttagcataatttttaaaaaattaaaaaattttcagttttctcttgacataaagtgcgctttactatgtaaaatacatagtatcaaaggaatttgatataaagctaggagaggaggtaataccatatagacgaaaaattggtttgaaggaatagagagctccaaaggggcttagtgataaggctgtcaagaaccttgatgggagcagcgactcttataaaaaatgcaaatagcaatctgtaaaggagaaaatagtatggaacaaacgaagaattatacttgtattactggagccagtgctggtataggagcggagacagcaagacaatttgcaaaattaggaacgaatcttattttaattgctcggcgtcaagaacgactagaaaaattgaagcaagatattttgaaccattatccggatttagatgttgttattaaagttgttgatttatcgaagtccagtaatgtttttgctctttatgaaagcttgaaaaaatatcacattactacgctaataaataatgctggttttggaaattatgataaggttgaatctcaagatttagaaaagataataacattaatccatctaaacattgaagctttaacaattctatcaactctatatgtgagagattataaagattgtaaaggcgctcaattgattaacttatcatctagaggcggatacatgatggttccaaatgcagttacatactgtgcaagtaaattttatgtcagtgcttttacagaaggcttggcattggaactagaggcaaatcaacatcaattaaaagctaaggttttagctccagctgccacaaaaacggaattcggtcaagttgctacagattctaaagaatatgattatgatgagcattttgctaaatatcacacaagtgaagagatggcacaatttttgatggaattatatcaaagtgacaaagttgttggtttagttgatgttacaaattttgaatttcatcttagcggaccactacttaattattaattattttaataaatagatataatatgtattgaataataatagttgtagccattttatgacaagaaaaaagcttctgaaatgttagatttcagaagctttttgtctatctattatgatttaaaccttggtaagttataattttctgtgatatttaggatatttaaaaatatagaagtatttttgtagactaatttacaatttttccagtattttaccaagtagttcttctaactttcttaaatctccatagactgttccgtccatataaagattgtaaacctcgtcatcttgctccacacgtatttgtgcagaatatccttttgacagtgctaaggaacgaataacttctcgttgagttcgtccattaccttctcggaagggatggaaataattaagattatcaagaatttttgctaattgtttaataatctcatcttttgaattagcagtttgataataggtatgaataaggcggtttatatatgcttgggcagtactgaaagattgtattgacataaaaggattcccattttttgagatattcaccttgcgaaattgtcccgcccaagcatagacatcttgaaataaatatttatgaatggctaaaatatcactaatggagtagacttctatggttttcaagcgcaagtctgcaagccttctagtaacgaataaatgctcattccggtaggcttcttcaatatttgtaatattttgtttgttgattaagactgtagaatttggataggtatattggtgattggggtcaatgtactcatagccttcgtattgatttttaaccaatattcaattcctttcgtttgttgataacataagtttttaaatcaatcacatcttgaacagtaggttcataattttcaatcattgatgacccaatagcataccagacagtatcaaaatctgaaaagttatcaaagggaatccctaaaattgttaattcttctttatttacatcaagagtcatggcacacctccttgtatagagttatccttattataccataaaatcggtattttcacctaaaggatagagagtggacaagataataacttaatcagaaaatattggtatataggttcaaaatagcgttactatgcagtgaatgctatttttttgaacttaaaaaggttataatagttctaactataatcactaaggagcctttagttaagtactgacatacttaaacaatcctataggtctcttggcatactggtgagctggacgctattcaggttaaattttataatcatagtaaccaaaagtcagacattgattccttcctcggtgaacttggtcaatagtctacgaagtttgaagtggaggagtagttttggagatattacatgacttaattgttaatctagttgttgcagttattactttttttgtctcgacaatatttaataatagacgtagaattaaaatatggtctcagtctcttattcgatggaacaaagatataagattgagttgtgcttacctatttcaaattaaacagactagtggccgctatttgctgataaaagggagaagaatagaccaatatcaacctataggaggtgtttataaatatcacgattccttcaaagggctaaaagaagaattcgagttgaaagatgaatctgagactcgattttatgaaagtggagatctaagattaataacaaaagggaagcaccttgtacagtttattaactggtttgatacgagaaaaaatagggaagtaactgtaattagagagcttattgaagaattagaacctgctggaatttctatagaggacctagtaacaaagtcgcaagttgaatatcttaaaactgtcaaagaaccaatcatgttttcaacttactttcaaatggatgaattaaaaatatttgacatttttgaagcaagaatacctacagaaatattagacaaagtattagaaaatgatgattattgtctaatagaggctgaggatatagaaaaaaattgttttactaaagacggactttctaaaaagatttcggcaacctcgaagtatattgtttaggaggaagatactttgacagatattactatctcaagagagattaaatcaattattgaagaattggatgtttcgtattcgaaatatgaaatagctactaatagatacaattctattgctaactatatcaaaaattcagaacttagcaaaaacagcccagatatatacttgcaaggatcgtttaaattgggaacagccatcaagccattaacagaagatggagcttttgatattgatatagtttgcaacttcacaaagttaagaagaaacgaccaatctcaatattctttgaaaaataatcttggggaaattgttaagagttacgctaaggctcagtcaatgtccagtgggccagaggaaagcaaacgctgctggacattaaaatatgttgatgaaagcaattttcatatagacatactgccgtcagtccctttaaacgaaaaaaatgatgggtttatagcaattacggataaaactcatgaaaactattttaaaattacttctaattgggagacaagtaacccaaaagagtacgctaagtggtttagagatctttcaaagttctctatctatcaaaaagaagttgctaaaagattttatgcatctattgaaaaagttcctgaatatagagttagaactcccttgcaaaggattgttcaaatcttgaagagacatgctgaggtttgttttgaaaaagatattgaatataaaccaagctctataatcatcacgacattatcagcaaagcaatatcagtctgccagtacaatttatagtgattttttagatattataaactatgttattgaacacttgaaggatgctattgaatttagaaatggaaaaccttgtgtatataatcctgtaaataaggacgaagttctatctaataaatgggataaagatagtagctattttgaagcatttgaaaaatggttggaacaacttaaattagactttaatgtagcaaattataatttatcttatttagataaaataaaatttataaggactagcttatttaagaatagtggagaacaattcccaattgttaatgtcaattctataagtcatcatcaaaattcaaaatggaaagagtttttgatagaagatgtatcaataaaggcaagttatctatataaaggatttaggtggaaaaagattgaaagcggaacaaaattgaataaacatggtagtcttaaatttgaagtactggctaatagtatactagggtatgaaatttggtggcaagtgacaaatacaggcagggaagctgaattagcaaattctttacgaggtgggttttacaattctgagttagtagaaggtaaaagagttagaaaagaaagtactctttacactggtagacattatgtagaagcatatctagtcaagaatggaatttgttatgggaaaagtattccgtttgaaattattataaccgataaattttcaatagattttgcacattgacggagattaaccggtaagttgtttatttgatatttcccttccttcaatcaaactcattctaaatttttgaatgaaaaagatgtcggactttgttgataatcgagataaagctaatctaaaattacttgaaacccaaacttgtgaaaccaggcttgaaaaaagctcgtaaagcatcacaatttagtaaacgttaaaacttatttacacttattgaaagcatttcgtctaatacgggatgcttttttgtcaagcttaatttttcaaattgagaattctcttttcttgaatttcaaaaaaaaagaacgtacaataatattggaaggactaccgcttaaacagagatagaaaggaaaaaattaggaaactatatttctctggtttaatgtgttagaactaaacgatatatcttttcgcattttatactacactaataactacgaaaggctaggtttattaaggagactcaacatgctcaagaaattcactacatgtgcttttatcgttactctaatttcttctgtccttatcggaagtaacataatatttgcaaatgataaagtcgaggatatccaagcgaaaccaccaactctagagataatggtaaaacaagcttctaaagattctactctcttggaaacgttaaatcaattttcagatcaggatacaatcattgcctatcctgaaaacatgggtggcgggttttctgttaaatctgcagatagtagcgaacctctagtcggagaaattcttgatactaaaggggaaaaagtcatttataaagactctcaacctgtcactattgcccaagtaaaggaagcgattcaaaacaagtaataaactgatataaataaatataaccggcctattattaaataggtcggttatttggctttccaattcttattaatgattcgccttactttcctatacaaagaaattacataaaagagacccttaggcctcttcttctctccttcaaacactctgtcactgtccatttactgtccaatatagtgtaatacatctaaaaattgttaattatgtcgcagactaaatcctttaaaatcaacatttctatgtataacaaggcttaaagaatcttaaattaagtcttctctctacttcatctcgagaattccatagtccttctagatgtcgctttatatgccagatcgctcttctaatattttcttcttttaaattattcatgaatacattgtataataaaatataatccaatctctttgattaaactaatttgcatgaaatataaacgattcggttaagaataagcttaaaagttttttgaagtaatctattcagcacaaaaaaacacctattcggtaaaataggtgtgaatgatgttatttatatccatattgttttagagcctttttatacgcttcgctacctttaagatagtagtcatgcttaactccactaatatcaacagaaaagaccccatctttaaatgaatattcttctgttcgacttgcaatattttgtccagttaattcgatcgtatttttttgtttgttaatgataaagctgtcagcttctccatgctcaatggaagcattatttcctttaatagtaaacgctaactcgtttctttcacttgagatccaataatactcaccatctaaagattggtagttgtttttagagcaagcaattaacgtaattattgataatgaaagtagtaatatacctattaattttctcataatctgtgcctccttctataattttaattataccaaaataatattacaagagtatgtcagtgtctgttataacggaaaaatgaagaaatgtctattataatagcaaataataactttcgggaaatctgatgaattcaaaaatgaaattgatacaaatttggttatttttaataaatctaaatacccgtttatagttcacttgttgtccaggtaaaactaaaaggatttagtcatgtgaaatacagaactaaatcctttggatagcctatttgtctatctttttggggtcagtataaaatcctcccctaacaataaattattattttacaacttttattacaaatattgtgtttttaatcattaaatataagccaactatctattttatctttcggtttttcccaacttgcaataacacgtattcctttcatttctgtactggaaatacctaattttcctccttttcctaataaatataatgtatattgcgaatcagtatttgcttcataagaacccttgataaatttttcatctgtactaactttccaagcatctaatctaggaatactaatttttatatctgttttttgagcagctatatccaatgatatttctccttctttaatttcccttatgcttacttctttattttcttttaaatctatttcccctgactttgctatgattccatctttagatactacaaaaacaatagctttgtcttgtttttctttgactagatcttttggaaaataaaatttttctccatttgttctattcaaaatacattttttccccatcgcaatacccactgtatctattttttcttttgtttcattttttactgtaaatgcaacatcaatatcatcactatttctgttcatgtaaaagaataaaccacaaatgcacagtgctataaccggtactaataaagcaatcttccttttcatcttaacacctcccttatagctgacttttcaataatataattcttatgtgctactttttcaaagtccttatcatgacttacaactacgatcgtcttaccttcatcatttaatctaataagtgtatcgattacaatttttttattctcataatcaagagaacctgtcggttcatccgccaacataatttcaaacggttttatcatatttcttgcaagggctaccctttgctgttctccacctgaaagttcataaaccttcgattttaatttgtctgaaatgcccattttattcaaggcagcttctataagatttttcttatttttttcttgattgtatttggcagcaagcatcatattttcctcaaccgtcattttttccaccaaagcaaaattttgaaataaataagcaattttttctctgcgtaatagctctcctactttaggatcttttataggatctcgatttgaaaaacaggttacactaccactatcataattttctaatgtcccaattatattcaaaagtgttgtttttcctcctccacttttcccaaagatacaaacaaaatctcctttataaatatccaaactaatattttccaaaatactgtgttccccatatttcttagagacatttcttaaggttatttgcaattccttttctttttgcatttaatacccctcctttaacctaagtacaatgcttctttcacttttctttagttgtaaaatttctatgccaaaacatataaggcttccacaaatacctattattaaactaatcaaaagtttagacatactccaaccatctcttggtataaacagtccaacatcacttattactcctgttaccataataaccataaataaaataataatacttatgatataaccaacgatattttcaataattttcttatgatgtatatcaaaaaatccatatcccaacaacctagaaacatctattcgttgtccatgattataaaaatatgtttctttatctatttttaataacgttgctaaaataacaatagataagacaagaccaataacatatatacttgcctccatcttatattcgtctattcttgaaactatatcatcgtagactgagctgatatagagtataaacggctcagattctgtttcttcaattatgtccttcaaactctcgtatcctctactaggctctttgacatatggatgtagctgcccatttactaaagatgatagtttgattccataatctgggagtaattctttcccatttactgctaccaaaacataatttttcaagtttgcttcatcaattcttttgccactatcaaaagaaaatacactttgattatctttcagccttacatatgtttctgtaattgtaccttgtttttttatattttgaaaaatatgatcttcatgaattttttctttgtcaaattcagtaattttaacatcttctggaacaaaaacaatccactcattttcatgtattttatattgttctattttattcgtatctttatctaagagattagcaatatgtaaataatttttatttacataggcataattgccttgaaacggttgttgatttagatactcctcatcatcattcattccctcttttctaacgtttggggcattaaataatattgctccactatcgtccaaactattccataaattattcatctttggaataacaatctcatggaacttatcatcatctttttcataactccaagaccatgcacaagccatatttgcataatattttgagctttcccaagttggaatgtattgtttcatactcgagtaatcagcgagtcctaaaatacttacaattgctaaataaagaaccataacaatcgaccctgtttttataagaaaagaacttctatgataacttcttctataacctttcaataaggtaataacattaattccttttaatttgagataaatcaatataaactctattgatattagcccccctattataaaagcaactaaaataagtattgttttcattgatatcataaatcctaaaatatcactaggagcaactaaatattctataattccaatcgtcagtacaagtcccactattgctggtattgcaagaatatttaaaaccttagaaatagctaaagttaatttgtcgtatcctagtaaaattgatatcgataattcctttgaaagcatcccattataaataattagacaaaagacagtagctacaaatataataaaaaccgtaagcatatatagatatgcttgtttctgtgtgaattcactagaaacagtataatccggattaaccacgacctctgtttttaatttttcattttgatttatttcttcaataaacttattaatatttacttccgtacctcttacatgataatccccattaactttttccttgctgacgttttcaaaaggaattaagcttatatcttttgacgtgagtaaactcattgattttacattctcaaaatcattcaatttgtctttgctatcagcaatagatatatctctaaaagatttcttgaaccattcagaatcatttagatgaatgtaaatctttattttctgtttatcaaatctactattcttaggaatatattcttcctttatgaagcttaaatcatttttattggcgattttctgcaattcaattattgttttatcagctatttctggctttgttacaatgtttacagtagtattaaactcttttaagaatatatttaaaaacataccgtctgaatagaaaaactttcctataccaatcactataattagtaaaattgccagtatacccactgtttttttcattctgcatcatctccaactttataaaaataacgagtatgagtaatgccacaataattccattcaaatataaaagagctatccttatttatattatagaatagctctttgctttatacttaacggtatctttaaataattcttgcgttttctttgcgatttaatttaatatatatggaagtattactttagcacaaactcttttattctcctctccaatttcaaaatttccacccaagtgttttacaatgtcacttacaattgtaagtccaagtcccgatccattattgcttattcgtcttgataaatttcccctataaaactttgaagtaaccatattccaattcacatttaaatttggagaaacatcgtttataacacttatttttaacattccattaatttcctcaacctttatatttatgcttgttcctttcacagaataattaactgcatttgtaatcagattctccattattctaagtaaaagttgtggttccgttttaatcttactgttttccaaatttaaaaactccaaaattaaaagatgatcttttatagataaacttttttcttcttcccactggctaaaaaaaatttttatatctacatccgttaaatttagtggaatttcatttaaattgaattttaaatatgaaaaaaaatcttcacttaaacgatttaaatattttatgttctcatatataacatcaacaaacttatttttttgttcttcagaaagatttttttcgtcttttaatagtgttatataacctatcatattcgcaagaggagtttttatatcatgagctaaatacgttagcagatctgttttttctttatataccagttcatactccttttcaagttctttattgtaattatgaagttctataaacaaatctcgttcctttgataatgactcatgaaatggtattaaatctttatcttcacttttaagataattcagtccagactcaaaatattgattatatacataaaaccttttttcctgtattataaatgtccctatcaatatagcaacagcccctagtaaaagtattatatatttacctatttcaaaataaaaggaagcaaatttatctaatggcaattctggatctacactgtcaacaaaagaattatccattattttgtaaataatgaaaaataggattgtacttaaaaatatccatagtatttgataaataataccttccacaaaaaaacggtttttcttacccattgattttataccccactccccaaacagttaatatgactgattttaacccaatcttttcaaacttacttctaattcttcttacatgaaccataactggattaacttcattttctagcaccttatcaccccatattttatagtgtatatcatccatattatacactttaccaggttcttccataagcaaccacaaaatatcaaattcttttggtgttagttcaatctctatattaccatagtaaactttatgtgttttaatgctaatctttaaattattaacttctctatcacaattaattgtatttacaatattttttgtaaatacataatttcttctaaaatgagaattaattctcgcaatcaattcagatggttcaaacggttttacgatatagtcatctgcacctatattcaatccttgcactctatgaataggatcttctaaggcagtaagcataatgattggcatagtggacgtttctcttatctttttgcatatttcaaatccatttatatcaggaagtaaaatatccaataatatcaagtcatatttatttttttcaaattcctctaacgcctcttttccagtatgaaaaatgctgatttcccaattctctgatattaaatacatccttataagctctgctaaattagtatcatcttctacaagcattattttcatttcagtcattcatttccaccctccttaaaactacatacatcatttggagtacattccaatgcattacatatttttgccaaatttttaaatgtgattggcttattttttcccatctgtgccatgacattagttgtaatctgtgtaataacaataacttctgttttctttaatccctttttggcgagttgtatccacaagggtttataatttaatgctatgccgtttcctcttttctttagatataatttttatgtgtattataccataaccattgggtacactcaatttttatttgaggattaattttgttctgaaattttaattataccgtcatatattcattttgataattaaatagtaaatattatatgattagtatccatttagtctgaaccatctcttctgataaaattaacatatctactgtatttgataaatatattcaatacatcaatctacgtgattataaaattcattttatgatctcgtagaagtgcaccaacaaccaaagggcgctagccttcaaattttcctcacaaaatgtgtccaaaatattgacagaattccaatatcgagcattttttagatctatccaatccaacagtcacgaaactattaaaatcgatggaaaaagaaagatggatacttcggaaattcgaccaatctgatttgagaaaaaaattgattggattaacagaaaaatcatttatgctactatcaaccgaaaataagtaattccaagcaagttcgaataaaagcctagtcaatttaaaaaaccaaataacaccctatatattagtgtctttttagaggctactagattatttatttatcaaagtgatatcatttaaaaaatacatagcttgtataactgttacatattatctatatattctatctacttctagtccacaaacatataaaaaagaggcatttaagcctcttttgttctccttcaaacactctgtcactgtccatttactgtccaatataatgtaatattattgaatatcgttattttttttgaactctaaagcctttaaaatcaagatttctaatgatatcaagacctaaagaatcttaaattaagtcttgcatattcatcatagtaatgacattccttccaacttctgaaatttacagttcattataccattttttagacgcttggaaaagctttggtgagggaactctgacatcatgcctgctgtttcaggcaatttcatgaagagagaaaagagttttgaaatctgtgggcctcatcttcctttaaaagccagaatgtcctttcaaatactcctcttcttccttggtcgaaggccgtcctaagatggcattccgatgtggataacacccaaattgttgaagaatgtccatgtgcatcttctcatacttcaaacgcttttctaagcccggttgatcaaataggcgcagggcttcttcatgaatggttaaagattccgaatgcataaagggcatgtagaaaaagcctctttgtacaactggtaattcttgagcttgtgttaggccttcttgggccaagaccaaggccagggaatctgtcgcaaaagcttgggcagtccctcgaaaaatattgcgaggaatttggtccaagagcaaaatctctgctaaacgcccttctgccgtagcccgccagtgaaacaattccccacgactggccttccaataaagttcctcaaagcgctcccgcatttcttgatccagtgcttctgattttttgaaccaatcctctggcttcaactcttcgaaccagaaccttatcacttccttcattgcttaacctgccataattttttcttttgttttttcatccaatgcatcattcatccggccgtacttatatccagccaaatccaaggctacataggtaaatccgatttttttcatgtagtcattgatcttgtcatgcagttggatggctttaagcagatgatcttcttccacttcgatgcgcgccaagtctccatgcacacgcacacggacttgctcaaagccaagtcctacaaggaactcttccccttcaaaaacccgttgtacattttctgaagtgattttcactccgtatgggaagcgtgaggcaacgctacaagatggcaccttattccaattggagacccctctttccttggccaattgacgaatttctgtcttatagaggccggcttcttgcaagacactgcggacacccgcttcgtcccgagccttgataccagggcgaaaatcgtcgatatcatccataatattgccgtctaccaattgcttaaagcccagttctgtaactgaatccttaatagtttggtacatcaattgtttggtgtaataccaaatattgggcgtattggcagcaatccgtggatcactcaattctctcatttccagtccaagcacaggtgctcctagctgatcggccaagtcgagcgctagatcgaattcttcatttgaaaacatctcagagttcacgacggccgcaataacattgtcaggtcccaaggtatccaaggccaccttcaagagataagagctgtcaatcccacctgaataggtaacggctacctttccgatttttcgtaaaatatcttgtaatttttcttctttttcttttctgatttgtgcttctgttgccatcttagaatagctcccttccgataaattcttcaatccgttcattatccaaaatcacgatcttttgctgtcgaatatccaaaacaccttctcgttttaattcattgagaatgcgattgacactgtttcgcgtcgaaatcccacaaaaaccggcaatatcttcattggtaatgttgaaatcaatcaagaagccgtcttcttgctccacaccaaacaaactgcttagtttttgcaaatgaaaacaaaccgccccttttttaccattcatcatcatatactgctgagactccatactttcagacagtttattgcgataatagtccctcacatagtcctgcagctctttatgctctttgacaaaattccaaaacttgacccgaggaatacgataaaaacttgcttcttctgtctccactcgcacattgaaaggtgagtctgtatagttggacacctcatcacgaatcaaagagacaatgtcaatggcttttagataggaaaagttaaactcacgcccatcacgcatgatgacacttgtcttgaccacaccttctttcaagatgtagatgtaatcctctttgatcccacgataggagaggtaactatggtattttttcttgacgatcggcgttcgcctctcttccaaaaatttcactaaaaattctgaattcacgacggtttttcctccccatctgctctttcttgaaatcacactaatgatacacctgttcttaaacaatatagttaacatttgttgacatcaattgatgcacacctctttttaaaaagaattatactataagtatcagtattaataaaggagatcgcaaataatggtagaaattaaattaccgtacgacaaaaaatcgattgttgcaaagattccagatgaaaactttgcaggattgttagagtctaaggcggaaaacttccataacccactgtctgaagaagaaactgttgaacgttcaatggacaaccctatcggcagccctactttggaagaacttgctaaaggcaaaaaagacatcgtgttgatcagttctgaccacactcgtcccgttccttctcacatcatcactccaatcattttgcgtcgtattcgctcagttaaccctgatgcacgcgtgcgtatcttggttgctactggtttccaccgtccttcaactcgtgaagaattgatcaataaatacggccaagaaatcgttgacaatgaagaaatcgttatgcacatttcaacaaacgacgatgacatggttaaaattggacaactcccttcaggtggtgactgtatcatcaacaaaatcgctgctgaagctgacttgttgatagcagaaggattcatcgaatctcacttcttcgctggattctcaggtggacgtaaatcagtccttccaggtatcgcatcatacaaaactatcatggcgaaccactcaggtgacttcatcaattctgataaggcacgtactggtaaccttgaccacaacccaatccacgaagatatgctttacgctgctcgtactgcaaacttggccttcatcgtcaacgttgtattggacggcgaaaaacacatcatcggatctttcgctggggacatggttgaagcccacaaagttggttgtgacttcgttgcagacttggcacatgtgtctaagatcgaaagcgacatcacaatttcaacaaacggtggtttcccacttgaccaaaatatctaccaagctgttaaagggatgactgcagccgaagcttctaacaaagaaggcggaacaatcatcatggtggctggatgtgcagatggtcacggtggagaaggtttctatcgcaaccttgctgacgtagaagatccaaaagaattcttggaacaagccatcaatacacctcgtttagagactgtcccagaccaatggacttctcaaatcttggcacgtattttggtacaccaccatgttatctttgtatctgaccttgtagatcctgaattgatcacaggtatgcatatggaacttgcaacttcatttgacgaagcgcttgaaaaagcctttgctcgtgaaggaaaagatgctaaagtagcagttatccgcgacggactttctgtcgttgttgaatagaatcaaacatggattttcaacccaatctagaacagacactccgttctttgcaagcaggccatctctcagttgaggatgcgctggagcaaatcaacggggttaaagaactagggtatgcagcaattgatactgaccggcaacgtcgcaacggcttccctgaagtcgtatacggcgaaggaaagacagttgagcaaattgaaggaatcctgcaatttctttcacaaaaagaattgccgatcctcacaacaagagtctctctccaaaagggagaggctctttctcagcgctttccgactggccactattatccagaagcccgctgcttcgttctcaactctaaaaaggaagaagccgatcctgaacactacattgcggtcgtcacagcagggacaagtgatgttcctgttgcagaagaagctgcagtcactgcagaaacctttggccattcggttcgccgaatctatgatgtgggagtcgccggcatccatcgcctcttcaatcgcttagaagagatccaaaaagccagtgtgatcatcgtgattgccggtatggaaggagctcttgtcagtgtcgtaggaggccttgtggatgtccccgttattgccgttccgaccagcattggatacggaagcaaccttcaagggctaacaaccttgatgagtatgttgacttcttgcgcttctggtgtaacggtcgtcaacattgataacggatttggtgcagcttattcagcatgtatgatcaatcgactcaaccacaatcgaaaggaaaacgaatgaccagtctatttttagaacctttttctggaataagtggcgacatgctcaatggtctattggttgaccttgggggagacgtcaccttgcttcgctccgaactcaaaaaactgggagtcgatggtttccacctccatgttgatcgcatcgcaaaaagcgctatctggggaactgattttgatgttcaccttcaccacggggagaaagatacggggattgaaggcgatttcgatcgtgatcacgaacatcatcacgatcacgaacatcatcatgatcacgaacatcatcacgatcacgaacatcatcacgatcacgaacatcatcacgatcatgaacatgaacatgaacattcccatgcggatgcccgcagttatgcagacatccacgacttgattgtcgcttctcagctgagtccttttgtgaaagataagagccttgcagtctttcttgacattgcaaaggctgaagcagctgtgcacaacatgcctgttgagcagatccatttccacgagatcggtgccattgactcgatcgtcgacatcgttagctttttcatcctagtggaatcgctcgagatcgacacagtctattccactcctctcacggagggaagtggaacgatctcagttgcccatggggaaatgccagttccagttcctgctgtcatgcagttgagaaaggaaactaccattccgatcactcaagacttcaccgtcaaaacagagttgatcaccccaacagggttagccctcttgaaagcaatggacccgatctttgaaccaatcccctctcacctttccatcgaaagtgtgggctatggatttggtaaaagagagactggaaaattcaatgctttacgcggttcgctattgaaagaagacacctctcacagcaccactgttgttcatcgcacggaagatcaaattattgagatcaccactacgatcgatgatcaaacaccagagcaacttggttatattatccaccggttcttggatgctggcgctttggatatctactatcgtagcatcgttatgaaaaagaatcgtcctggttttgagttaacacttttgattcaaactagccagctagaagatttttcaaccctcttgttcaaagaaaccagtaccattggttttcgataccaacaagttgaccgcaaggtcatgcaacgtcgatttgaacaaatcgatacagaatttggtaccgttacggttaaaatcaatcagtacggatccatcactaagaagactcttgaatacgaagactgtcagcgtattgctaaggagatgcagttgccgattcaagaagtttatcaccaattacaaaaatatatttattaatttaggagacatttattaacatgacacatcaattacttgcagaagttatgagtacagctttgatgattatcttcggggttggcgtacactgtgacgacgttttgaagaaaacaaaatatgctggaactggacacttatttgcgattactacatgggcattcggtatcactgtctgcttgtttgtctttggcggcgtttcaatgaaccctgcaatggctttgcttaaagtccttcttggtaaattgacaatcgctcaattcttcccaattgcaatcgctgaaatgatcggtgccttccttggagctttgattgcttactttatgtatgctgaccacttcaagatttctgaaggtcaaattgatggtgttgctatccgtaacatcttctctacaaaccctaactgccgtaaccttccacgtaactacttcgtcgaagcgttcgcaacatttatcttcttgacatctatcatggctgctgaacatgccaacgaagcaatgcttccattcactgttggtttgatcgtttgggctatcggtatgggtcttggtggtactacaggtttcgcgatgaaccaagcgcgtgaccttggacctcgtttcgcttaccaaatcttgccaatcaaagataaagtaaacaacgactggcaatatggtcttcttgtaccaggtactgctccatttgttggtgctgtccttgccttcttcttcatccgttacttccttggaatcatgtaatgagttgatcaaagaatcattcaaaagcaagcatcgaaaggtgcttgttttttgattccttcatttccgaagccgtccataaaatgatataatggacaaagcaaatcatgaaaaaacaagagaaggaagaacgacatgactcattttcacaccattgtcattggtggtggcccagcaggtatgatggctactattgctagcgcctcttatggccaacctacgctactgatcgaaaaaaataaaaggctcggtaagaaacttgctggtaccggaggaggtcgctgtaacgtcacgaataacgggaccttagacgatttgatggccggtatccctggaaatggccgtttcctttacagtgtgttttcccaatttgataatcatgatatcatccaattttttaccgataatggcgtcaaactgaaggtcgaagatcatggtcgggtctttcctgttagtgatcaatcccgcaccattattcaagccttagaaaataagatccttgagctaggtgctagcatggccaccaactgcgaagtggtctccgtcaccaagccagaagacgtcttcatcgtcaaatcatctgaaaacacttggacagctgataagctgatcgttacgactggaggaaaatcttacccttctaccggctctactggctacggacatgaaattgcccgccacttcaaacatagcattacagatctagaagcggcagaaagccctcttttgacagattttccacacaaggccctccaagggatctctctgacagatgtgaccctcagctacggcaaacacatcatcacacacgaccttctctttacccattttggactttctggccctgcagcccttcggatgtccagctttgttaaaggcggggaaatcttatctctggacctccttccgatcacttcttcccaagagttaaaagactttctagaagagcatcgagaaaaggccattaaaaatagcctcaaagccctacttcctgaacggttagctgatttcttggcgcaaggattccctgaaaaagccaagcaactcactcctcctcagacagaagagctcattcaaaagatcaaagagttgcctatccccgtcaccgggaagatgtctctagccaagtcctttgtgaccaagggcggtgtcagcctcaaagaaatcaatccgaaaaccctagaaagtaagctcgtccctggactccactttgcaggagaagtcctcgatatcaatgcccatacaggcggttttaatattacatccgccctctgcactggttgggtagcagggagccctcattactaaaaaaacgaactcgattttccatcgagttcgtctttttattgttccttggttaatgaaaaacggaaatcattgtatttggtgtaatcaaattctgtattgacaggcgctgtgaaaacaattggggtataatggccttcttctaagacaaaacctggctccagtcggaagttggctacacctagacctgtgatcccaggaagcaaggcatcagctccatccaatccttctgactcccaatagtagatattgcctgttgcttttactgctcttgctgtataggtcgctgtccgagtcggttcgctatcatttttgaagctaaccactgttgtcacatccccattggcatccactgtcattttaatcgaatccgcttgtgggctagatcctacccaagttcccaccaattctgcagggacagtagcttgcgtcgtagtagacgcattctctgtcttaccagagtcttttgaagctgtcgcgctactggcttgagtcgaagagctagctgtatcgtttgcttgagaggaagatgccgcactctttttgctattacttttggcttttttctctaccttgctggtagatgcttttgcggatgaggaagctgtttttttatcctttgcaccacaaccaccgagagctagaccaagtgaagcagccaccagaacagcggcactccaacggaagattgattttttcatacaattacctctttatctttctgactcccattatactccaattattacaaaaatcaagtctttttgtaataattgtaatttttttgtaacatattttccatttaaaataccaatcgtaatagggcgatcaagacaattccaaacaaaacggttcccataaggtttttgtaacgaaaggctacaaagagactgggaatggtcactactaggtccaaccagtgaaactgcgggaggcttccaattttcccctctactaagcttgataaaaccaaggcaaagataatggaaatgggcaggtatttgagaaagcgggtcacaggagccggcagtcccttgtatttgactaagaggaagggcaagatccgaggaatccaggtaacgagggctgaggccagaatggccatgaagatataactattcacgcgcatcacagaccacccccacaaaacagccgatcaaggtcgcagctaacactgctagaggttgcgaaacaaaaaagagtaagagaaagaaactcactgctactgctaacagcaccatgagcatggtcttggtcttttctgtcagttgcattccttgaaattgggctgcaaaaatcccaataaacatagccactaaagcaaaatcaagcccaaaagcctttggatcaggtaggagagaacctagagctgttccgataaccgtcgcactgatccaggccacatagcctactagattgttcccatgcatccaaggaactgtaatggtatccgtctttaacttctcactcaagtagaccccataactctcatcggtcaggaggcttccaatcccgatggtatgagcgagactagcatccttaaagtcagacgacgtatgcagactcatcaacatattccggagattgatcaaacacaccgtcaaggccatattcaagatcgaagaatgggccgcaatcagagagatcatcgcaaactgggccgccccagcatagaccaagatactcatcaaggccatctccaaaggagaaagatagggagacgccaccacaccacaagccaggccaatactgatatagcccaaagccgtcggcaacgcatccctcaccccctgccaaaaatctttttccactctctcactcctttctgaatcattgacctctattataacacaagaaaaaaggttgaaaaagaagatctagtatagaaaggataccccctttatactcctatctctcccctacttatttacttttaaatccgacatctctaacgacatcttttcttcttgtgtcatggtctcgacaatttgtttttgctcacttgatattggcaaggtcaaaatcgtagcagattgatctggcaatactccactgtcactaattctataaccaatccgttgattttgatatatgaattacccatcatatttccaactcaatgaaaactcaaaatccttatcaatttgaaatccagctttgttaatcaatagaaaaacggcatattcttgttgatttgatgagaaagttgcacccgtatagttgatcgataggcttccttgatttccaagttctggatgttccttggttaatttcttccctagttcaattacatttgattctttcccttcatactgtgggggcactacaaattgcaaacctgtctcatttttaatagatgaagactcttttgaagtctgctccgttttattctgtgaagaatcttttgattcctgtcgaaactgggcgcatgctgttaatgatagaagcgctatgaacaaaacgatcgttttgttcatcatttctactccttttttcttattcattcaattctaattactttttttcaatgattatctcttctacactatcaagccttaaatttcctgttttcgctcctaaaagaactggaactttaccaaattcgaaggtcaatagaaaagccgtaagaataccgcctatcaccaaaaagatcccctcttgtccattattgttgaataaatacatggctaaacaggccagtaagacaacatttaatagatgggcatcaaaaatttgctttctttctggtatcggcttgaaagtcaccctgtatctcttagtcgctgtaggaaatagattcttaacttttttacgagcctttgctatagaaaatcgaaagaacgcaaaagatataagcatggcaaccatgaataagaccatctttagaaaaatttgctgactaatatcatactcactgaatagattttgtaagagtctataaaccactccaacaaatggctggactataatggctgctgtccctccttttattttattgatgggtgtgcctggaattgtaacctttttatctacttccatcatctcaacagtgatctcttccgttggcaacccccaataatagagcttgggcttcatagtactagcatctaacagaaatcttttgccatcgtactctaccagttgatgacagaaaatacttgtttctttatattctaacatcctatttacttcctacatcctttcaacatagcatcctagacggtaccaacccgatccgatccaatccaactttcttctcccaatcttccagatgaagctttactcagccaattccccaccttttccattgtagtattgtttaaactcatcataagaacgaatttcatgttcttgaccatctattgagtactgagcttcaatttttaccccagataaaatgtcctgtcctttaggtgcaaaccaatgaagaagagtatcaaaccattccttactacttaataactgtaatctaggttcaatccagtacttaccactcaacattttctctttgaattccggttaaattacaaataaattgatatctgtctttacattcttagcctgtttctgaaatttaaatcctgcttgaagatcaaaaccggtattcttatcgattaattccattaaatttgtatagtctattattttttccttaactgcactgccctctgggatggcatatttgctatagtatttctgttcatccaacttgtaataaatattttccccatctccaattttacgttccattgcactacgagaatcataatagatgagatctacaacacttactccactattaacatttatttgataatcataaataaaggcttttggtgctgtctttcgaatctcgtctaaagcatttacggttgtttctttaaattgattgtcaatatcgtaatatcggaatccgacatactcccattttattcttttatcgctttttacatagtcaaaaccaaccagatactttccatcagccaaagtcagatccttactcaaaacaaattgatttttctcaccaaatagctgaacatccttgagatttccttcatggatgactttagttgagctaggtattttttcaacagaatttttcttagtctctgaaggtttaaaatagagtactaaaccaactacaatgattgccaggaaaaccagtttcaaacttaaaaattttttcaatacgtccacctacttttccaaaggcctcatgcccatcagagatttccttaattaccgttttccacttcttgagatatgctctccatcatatcgggccatttggataattggtaatcaaatttgaacataaatatcactataaaactaatcatcaaaaagagtgctgcaatagtttcatttccgatggcaaacaaaagaattgcggctacagttaggaacctaaaaagattgaccagaaatgtaaagtacaccttccgtctctttaatgccttaattaacttcttgcactgatcctcatccaacttggatggctgtaatttcaggcttgcatggtaatatcgaatgatccacgcagctaggaagtaggagataacacctaaaatcggaatcgttccaagtcgtaccaactgattgtcaaatattccagcttccgctaatccatccgaaattttgttgataataaataatgtaatagggagcaatacataagaccagtagttaggagaagatgtctcttctagtaagattttttcctcccaatcaaaatggtaattcttgttctcccatatccctaaattaatcattgtttgcataacaacctctttttcactctccttgtatgtttcctattttattgtagaattgtttaaactcatcataggaatgaatctcatgttcttggccatctatagaatattctgctggtattgtaacatttttaaataaattcgttttttgattcactaaaagtttaagtataggaatgttcgtatccacactaggtctatctaccaaaatccctatcatagaatgattttcggaaaataaatctttagtatttgggtacttatcaaacattacagcatcgggttcaggaaattttttggttttatctaatgagattctacgatcagccattgttagctgttcatgaataggtaaaaatgaaatatagttggttgaatcattcacaacttctttttccgttgtatcaccttgatcaattaccttccctgattgtaaatcaatggatttaataatgtccttcttataatgatccttaggactttttaagtatatatccaacaattctttgccattactaatatagataacattgtcaattctatctggtacatatgatttgttgtattcacgagtcattttaaaaagatcataatccttaggagttaatttcttattttttatattgtatatagtaataccccaatactctttcccatccggaatattatgtttcatatcattaatatcctttagtttgtggtattctttaacaattttcgttttcccaacaattggataagatcgtaacacacccccattattctttgtcatataataatcgagtttattttcataatcccattttgtaatgataactttcccattttcaataaaatcataatcaacaattttttctttcaaatcaataaacgtatatggttttatataaatagagatataagtcctataagacaaaatcaataaaaagccaataccaatcattacaaagattagttttttgactctattcggtacctttaccattttctctttctctccctcaccaatctttcattccttctatcataccgaattttctttcacctcgcaaatccgctactagttggtgagatcccagcaaaaaagccattggaccttgcacatccaattggctcctttatcttattcaattccttcaaaggctaggcttggtttggcattgaggtcccagcctgcgaagttttctttgttccactcactgacactggcataggcgatcatccctgcattgtccccgcagaggcgcagtggtggaatgatgaccttgacatcggtgatgtcagaagccaggcgttcacggagaccttggttggctgcgaccccaccagcgacgactagagtcttgactggatatttctccaaagccttcttggtcttggccatgagaatgtctaatacggctgcttggaaactcgctgacaagtctgcattggagaggctttctcctttttgctcagcattatggtgcagattgataaaggccgatttgagccctgaaaaagagaattccagattgtcttccttgatcatggcccgagggaaatcgtagatatcagccccttggtgggccagctgatcaatctcacgtcctgctggataggtcaagcccatgacgcgcccaaccttgtcataagcctctccgacagcatcatcacgggtctctccgacgatcttataatcaccagcttcactaacgtagactagctcggtatgtcctccactcaccagcaaggccaaaagcggaaactctaaaggctccacgctttgagcggccatcaagtgccctgccatatgattgacaggaatcaaagggaggccgtgcgcccaggcaaaagccttggctgcagctaggccgaccaagagagctccaaccaggcctggaccataggtgacagccacagctgtgacatcggcttctgtgatgccagcttcttctaaggcttcttcaatacaagcggtgatgacttccacatggtgacgagaggctacctcaggcaccaccccaccaaaacgcttgtgactttcgatttgactggcaatgacattggacaagagttggtcgtcatttttcaagacagccacgctggtctcatcgcaagatgtctcaaaagccaaaatatatctatctttcatttgggttcctcttcatgatcacagcatcctctatgggatcgtgatagtagtttttcctccgtgcaatttcttcaaaatgcatttttttgtataggccttgggccggttgattggacacgcgcacttctaagaaaatctctttttggtccggcaactgcgcaaataactgctgagctaagccttggccttgaaaggcgcgcttgaccgcaatctgtaagacctctgcttcatagagagtctcttgaatggcgacaaatccaaggacttgccccttatccacagctaggaaatagaagatcgattcctgctctaaatcagcttcaatctgctccaacttccaggggctagcttcatagacatcttccagcacagcgagaatagcagccgcatcttggctactccctttcctgattgttcctttcatcataggcgcttgatataagaggtcgttgtttccgtgtggtctttcagccaattttcctctgcttcgacccgtttgagataatgagggacaaaatcatggaggctagcgggcgcttgtttgagaccgagacgtccgattttcactgcatctggcagtgtttcataacaagcagcacttgacaagctagaggcgatctgctccttaaaggccgtgacttctccgacaaaggtgacctgctcactcgtcgctgcacgttctaggacttcctcaaatggaaaatgcccttctggtgcgaccagctgatcatcttggtaaaaacctgcataaacgttgttccgacgggcatccatgacaggcactaccaaaccttctagatcatctggcactagggctaagaggctcgaaaccccgaccaattcaatccctaaggtatgagccaaggtctttgcggttgcgaccgcaatgcgcagtccagtgtagctcccaggaccttctgccaccacgatgcggtccaagtccttgggtgtcaagtcaatttgttgcatcaaaaaatcgatgaccggcatcaaggtgatactatgattttttttaatagttaatgttgtttctgcaagtagagtctcatcttctaaaatcgctacagaaagagccttactcgaggtatcaaatgctaataatttcatttcctactcctcttgaactggattatattatactacaaattcccttcaaatcccagcgaaactctcccttagagcgcaggattttcatatccaaaaccgctcaaaagcttctctattataaccctttgcctctctgacttttccagtctatcttttacttacaggcaaatttatgatataatgataattaattgtatcgaatcaggtccactagttgcgagtaggaaactctagtgattgcactccttcgtagctaacaaatagaccgaaataatgaaaggaaaattacttcatgatttacaaagttttttatcaggaaacaaaagaccgcaaccctcgtcgtgaaaccacgcatgcactttatctcgatattgatgcaccaaatgaacgcgaaggacgcatccaagctcgtcaattggttgaagcaaacacagatttcaacattgaatttatcacaccactttctgagcaacaccttggttacgagaaagagtcaggtgcttttgaactaacggagtactaatccatggcttataccttaaaacctgaagaagttggtgtatttgctattggtggacttggagaaatcggaaaaaatacctacgggatcgaataccaagatgaaatcatcattgtcgatgccgggatcaaatttccagaagatgacctccttgggatcgactatgtaatcccagattactcttatatcgttgacaatatcgatcgcgtcaaagcggtcctcattacccacggacacgaagaccacatcggtgggattcctttccttttgaagcaagccaatgtccctatctacgctggacctttggcgcttgccttaatccgtggaaaattagaagagcacggtcttcttcgtgatgccaaactctacgaaatcaaccaaaacactgagcttcaatttaaaaatcttaaagcaaccttcttccgtacgactcactcgattccagaaccgttagggattgtgattcacacccctcaaggaaagattgtctgtaccggagacttcaaatttgacttcacacctgttggagaaccggctgacctccatcgtatggcggcccttggggaagaaggcgttctctgtctgctttcagactcaaccaacgcggaaatcccaacctttactaactctgaaaaagtggttggccaatccatcatgaagatcatcgaaggcatccatgggcgcatcatttttgcctcctttgcttcgaatatcttccgtctccaacaagctgctgaggccgctgttaagaccggtcgtaagatcgtcgtctttggacgctcgatggaaaaagccatcgtcaatggaatcgagcttggctacatcaaggtccctgctggaaccattatcgagccaaatgagatcaaagactatgcagctaatgaaatcctgatcatgtgtacaggaagccaaggagagccaatggcagccctctctcggattgccaacggaacgcaccgccaagtgcaactccaaccaggagataccgtgatcttctcttctagtccgattcctggaaatacaaccagtgtgaataaattgatcaatacgatttccgaagcgggtgtcgatgtcatccacgggaagatcaacaatatccatacttctggacacggggggcaacaagaacaaaaacttatgctccgcttgatcaaaccaaaatatttcatgcctgtccatggtgaataccggatgcagaagatccacgcaggacttgcgcgtgattgcggagtggaaaaagacaatatcttcatcatgagtaatggtgatgtcctcgctctaacagccaactctgctcgtatcgcaggaagcttcaatgctcaagatatctatgtcgatggaaaccgcatcggtgaaatcggggctgctgtccttcgtgaccggagagacctttccgaagacggtgtcgtgcttgctgttgcgactgttgacttcaaatcgaagatgatcttggctggaccagacatcttgagccgtggttttatctacatgcgtgaatcaggagatctgatccgtgaaagccaacgcatcctcttcaatgcaattcgcatcgccttgaagaacaaagatgccaatatccaaaccgtcaatggtgcaattgtcaatgcccttcgcccattcttatacgagagcacggaacgtgaacctatcattatcccaatgattctcacaccagatgacgaaaattaacaaaacaaccagttgaaaccactgtttcaactggttttatagtaaccttttgaggatcaaaaagagagtgggacagaaatcggtaattcgttagaattcgatttcgtcgtcccacctccgcacagttgagtagggctgtaaaagctgatgaaatcagcgtagtagagcccactcaaccactgcgtcttgctcgacaatccaaaaataattgagaggctaggacttttgtcctagcctctttactcttgtttcttaataaagatctaaatagttgtctacttcccattgagatacgaaggtcgcatagcttgcccattcgattcgtttggcttcaaggaagctggtgtagatgtgctcacccaaggcagctttcaccacttcgtcttctgtcaaggctttcaaggcattgtgaagggtagaagggagatctgtaattccagctgctctacgttcttccggtgtcatcacatagatattttcttcgatcggagcaggtgcttcgattttattttcaatcccgtgaaggccgacttcaagcaagactgccaaggctacataaggattggccattgggtctacggaacgcaattccaaacgagttcccataccacgtgatgctggcacacgtaccaatggagaacggttgcgacctgcccaagcgatataaacaggtgcttcatatccaggaaccaaacgtttataagagttgacggttgggttggtcaccgctgtaaagttataggcatgcttgatcaagccacccaagaagtgataagctgtttctgacaattgcatgccctttggatcttctggatcaaagaaggcattgttgccatcttggtcaaagagagacatattacagtgcatacctgatccggcaattccaaattttggtttggccataaaggttgcatacaagccgtgtttacgagcgatggtcttcacaacgagtttaaagatttggatcttgtcacaagcgcgaagcacttcgtcgtatttaaagtcgatttcatgttgaccaacggctacttcgtggtgactagcttctacttcaaagcccatcttggtcaagacattgacgatttcacgacgagtgttatctgcaaggtctgttggagccaagtcaaaatagccacctttgtcgtttacttcaagagttgggtctccattttcgtccaacttgaagaggaagaattctggttctggaccaaggttaaaggatttgaatccaagtttttccatatgacgaagagcacgtttcaagttgccacgtggatctcctgcaaatggttccccttctgtcgtatagacatcacagatcaagccagctacgctaccattttcatctccccaagggaagactgtccatgtatccaaatctgggtaaagatacatatctgactcgttgatacggacaaatccttcgatagaagaaccatcaaacatggctttgtttgaaagaaccttgtccagttgctcatcggtagctggaatttcgacgttcttcatggttcccaaaatatcagagaacatcaagcgaataaaagtaacatttttttcttttacttcacggcgaatatctgcagcagtaattgacatttttgtctccttaaaatagattacaagcttatgaaatgatcaacgaaattgaccatatggcgatggggaagatgtgaagcgactttgctgaagaatgtcacgatgaagagccttacggatctcttcttgactgacaaccttggtttgctcttgctctttttccgcatatttcttcttaatatctgcaatattgaagccatctgagatataatctttgatctcaagtaagcggtccatatcgtccaacgaatacatgcggcgattgccttctgtccgatcaggagaaatcaatccctgatcttcataataacgaatctggcgagctgtcaagtcggtcagcttcataacactgccaatcggaaagactgccagtgagcgtcgtaattccttttccttcataccattcctctttctattctattatatcgaaaaaaaaatctatgtcaagattaaatgttatataatcttacataggttttttgtgtttcttgagaaaatcgcgaatgcgatccacatccgaattgaccaaaatcgcaacgaaaacgccgataaaggtctcaaatattcgggcaaaaacatacaagaaggtttctccgttaggaatcgaaagggtaatgatcagcattgccgaaactcctccgataattcctgctttattattcatagcgacatttgtcataatggttaacatggtcgcaatgggtacaaaaatcagagtcacccaatacgccccatgaaagagcgtttttaaaaggaagaacaatacggcataaaaacctccgatactgttgcccatgacacgcgaagccccgaaatggacactcttatcaaagtcttccctcaaactaaaaacagctgtcaacgtcccgatctgaaggcctcgccagccaaatattccaaaaataagtagtacaataaaaacggcaatccctgttttaaaggttctcatccccaaacggaatttggaccaatcaaatttgtgtcgtttaaagtaatccatggtcacctatctttctatttctattattctaccatattttcagaaaggagagaacagatataaatagaaagaaaaaagagagcgggacagaaatcggtaattcgttagaattcgatttcgtcgtcccacctccgtacagttgagtagggctataaaagctgatgaaatcagcctagtaaagcccacccaaccactgcgtcttgctcgacaatctaaaaataattgagaggctaggacttttgtcccagcctctttcattctatttagattatttgtctgtaagagcagccaatcctggaagttctttaccttcaaggagttccatagaagcaccaccaccagtagagatccatgagaatttgtctgcacgtccaaggttgatcgcagcagctgctgagtcaccaccaccgatgattgatttaacgcctggttgtttcacgatagcatccatcacaccgattgtaccagcttggaagtcagggttttcaaatacacccataggtccgttccatacaactgttttcgcaccagtcaattcttggtcgaatttagcgattgatttaggaccgatatcaagaccaaggaatcctggatctactgcttcaccttcagtgtctttcacttcagtgtagtcagcaaatgcgttcgcttcttttgagtcaactggcaagatcaatttgccgtttgatttttcaagaagagctttcgccacatccaatttgtcttcttctacaagtgagttaccgatttcgataccttgtgctttgtagaatgtgtaagtcatcccaccaccgataaggactttatcagctttttcaagcaagttttcgataacaccgatcttgtcagatactttagatccaccaaggatagctacgaatggacgttctggagcttcaactgcttctttgatgtaagcaatttcgttttcaagaaggaatccagcaacagctttatcaacgtttgcagagataccaacgttagatgcgtgtgcacggtgagcagtaccaaatgcatcgtttacgaagataccatctccaagtgatgcccagtatttaccaagttcaggatcgtttttagattctttcttgccgtcaacatcttcgaaacgagtgttttcaaccaagagaacttgtccatcttcaagagcgttaacagctgcttccaattcagcaccacgtgtaacacctgggataaattgaacttcttgacccaatttagcagccaagtcagcagctacaggagcaagtgatttaccttctttatctgcttcttcttttacacgtccaaggtgagagaagaggattgcacgtccaccttgttcaaggatgtacttgatagttggaagagctgcagtgatacggttatcgttagtgatcacgccatcttttacaggtacgttgaagtcgacacgaacgagaacttttttccctttcaagtcaacgtctttaacagtcaattttgccattagatatgactccttctttttttaatacatgataattatatcacaaaatctgtaaaagaggtagaaaaatccaatgcttttcccctctaattcacaggatccgaacgacacttctagatacaagatcaaacctctctggttttcaccagagaggtttttttgagagtgactttttaaaagaacgaaagaatcctgtaaaaggcttactcttctttcttcttaccagccaagaggaatccgcctaaggctgataggagaacagcttcagctgcaaaggaagcttctaggcttgccgtatttggtaagtgttccgattgactttctttgctggcatcttttgtttcttgctgaactgttggctgtgagttcgctccttggtgggcacttaacaactgatggatctcttgatcaaccatatccttgtgttcttcctcttgatgacccgcttgagtagaagtcgttggggccaactgatccacttgagaagactctgtaggcttcaatggattagctggatccggagtcactggggcagctggttggactggttgatttggttgagctggttgaacaggctgatcaggtttagccggttcctctggttggatcggttgatctggtccttccgtttgtgctggcttatagacaatcgcatagtgagtaaagtgaggagctgtaaagatgactacatctccaactctctcaaaggccaaggattgaggagcttgaccttctgggaagaagagaacttgctccacttctttatccttatccacagggattttcacaagggatggatggtgggtatcgatatcttgaccgcttgcatccacgccttcaatatcaaatacgattccttctcggcccttcagctcttctttttctacctgattggcttcaacttttgcgacttttagtcctttgacaacggttggctctaagttggagaattgaacttcgactccagtcgcagggtctacaaagaccgctggcttatcttctttcaggagcgcaatcaaggtctctagacctgtcttagctgtttcaagcgcttcaggagtgagctctgaagaagctaggagctctttatttttctcaaccagtgcctgcaaagcctctccagaagggtgatttggcttgcttgttaatagagcagtcgcttctgttgtcagagcagagagagcttctttttcttttgttagattggcttgaccatccaaggctttcaagagagcggtcaattggttcaactgctcattgacttgatcttgtgtgctggtatcatgctctttcaagactttttcagaagcagccattccagccagcaaagcttctttgacttcaggagtcgcaaaagtaaagtctactttggcttttgcagcttcagcttcagccaatttttgcttaaggtattcatcgttgagagctggttttggattcacgaggacatcaaagcttgtactagctcctttgtaatggacagtgatggtttgacgaccttccttggtcgtatcaaagccagtcacttcaaccccttcatctgtcaaggcatgcgtttcggtcgtttcatcttcaaagacgactgtaaagcgtccaccctccttctccaatgcttctccgacaatatattccacttttggtttgtcggtcaattctagaccagcaactgctttttcacctgcttcctctgcactgaccacaaaaacagtgagggtcttatccaatttctgaccaaggtaagagacttctaggtgttgttctccaagcttgctactgtcaaatccatgaatctctacacctgagttggtgagattgaccagttgatctgcttggccatctttataatgaacgcggagagtcgcccctttcaaggaaagggcatcgccttcccggtagaccttcttagtcaatccatcttcaaattgaagtcccgcaatttctttatcattctttggaacttcgatcgccaaaacattactgatatctttaccaggaacttgtgcacgatagtaaagaagagacggggttgattcaaaagcgagcggtttaaagatgagatttccagcttgatcggctgtcatggtcgcaattggactagtggcttctttatcggcataaagagtcagagtagtattagctgggacatctttgaaaccgacttggacaaaatgattacctaggttttgcgctgcggcatttttcatcggaatgttgaccgtttcagtatccagactttcatacatcttccagttgtaaatcctgatggcttgccatggggtgccgttatctgccgtaatgacatggagacgccagtcttgagccttgattggatggtcgagtgtaatgtcggacacatgggctttattgccacgaacttccttagcaagcttccattcacccgcttcatccttgtagtaaaggtcgaagtcacgggtattcatcttgccatcgtcgacagattctccacccgcaccggcatggtccatgacccaacgaacaatggtccgtggttgtgtcaagcgaatatcgacggttccactcaattgagcagaagaccatttatctgaaagactggtaatggtaccatttaacataccttcgatgccttcactaccatccgcatctgggaagctcgaaccgatcactttggctccgatgaccacgtttggtgctagggcttttggaagactggtatctgacacggtcatcccccaatcaaaggctacagttcccgcatccgaacgttgaccgttcttcccaactgccacaacctttagttcctgagtggttccttcagcacttgctgaacgactaacttttggtagatagacggttgtcgcagaagaccctgttaagagacgccagttgtcgccatttttttcatagacttcataataatccgcatctgctacccctttaaaattgagaactgcttctgcttcttgcgcattttgtagacgttttgctcgaacggttacttctgctggagtcgctggtttctcttggtttgacgtaatcgacaattggccgagattaaatttgtaatctttaacatccgtatcatggtcaaagaacatctttacagcatagatggtcttgccagccaaacttcctaaatcaaaggtttgagtagaccaatctgcactcggtgtcaattccttccattcgtattcagagtagtcttctttggtggcaacagctacccaagcagctgcaccgactccacccttgtgagagacgctcaatttggtcttttctgtcactggaatcttggtcgaatagagcatgacattttgactgctattggcttttagatctccttcaaaggccagagaatttcctccattgtaggcttgatcaaaatcataacgacctttcaatggcgcactatcctcactatgctctacccaccaacgccatgttggaaggtagccagaaacagaacggtagttccactccccttctttagaaatcttgccatccacaaaccagtgttttccgtgtccagtattaaaggaagtattgaaatcttcactagtgattggggttttgtccactactagattagacataccgtaccaagattggtctgctggttttcctttagtcggatccccttggaaacctgtccagaatagatcttcatgggtatggtatccttctccagtctttcctagccctgtaatcgtatctggcgcataaagaccaagggatagacgcaacttgccatgttcatctaaaatggcattccagtctacattagtcttataagagcctcctttttggagctcgagtccagctagaacatcataaggattccgatgaatccatttagctgtgctgatggaataatcaacttctgatttgccccagttaaagttagcaaagaaggtatcaacaggattttccccattttctggctgcatgaaattgtagttgtattctcccagcgcattctcatggtaacggccatattcataggtcatagcatcataccaggaatacttaatcggatagttgagactcttcgcatattccttggtataaagaagaaaatctctcaattttggacccaatggttctacaagatttccggttgtctcttggttgataaagtaaccatcaaagccatagtacttggcaagttcgactaatttacgggcgatcgggaaggttttagagccttcactatcttctttcaaggtttctgcaaaatgttcttgatccttgatactgctagaccagttataaaagagtgttccataaataggaaccccatttcggtgggcagcatcgatcacatctgctgatggaaccagcccttcccaaaagaccatggaatctaaatattgccagtaatcaaaagcataggccttaaactcttccccgccgacagacgcatgatccttggctttggagttcatatttgacagtgcttggatcttcgcttcagggttggcttgttcattaatttgttttccttggaaacgactcgcaagtggaacgcttgctctgttcatatcgtcatccactcgttttcctggttcccacttcaagagatcgtcccaggtatcgaacttaacttctttgggtcttaattgtttttcttcattggttggtaaatcagccactttctcagcagtagctttcggtttttcagtctctgaaacagctggatgatctgtagtcgtcgagctagcttctgtactcgtaggactagcctccggagtgaccgcttctgcgactggtttttccgtttctgcagaaggtaaggccgcatctgcagtatagacgccagcttctctcactagatgattgacgtcttcggtcgttgctgaagatgcttctaaaggttgttcactagtagaaaccgtctcatctgcagagacagcgcctgttcctaaaaatgctaacccaatcaatgcagagcaaactcccacactgaattttcgtatactaaatcgttctttcttttcaaatagatgacctttcatcttgacctccttgtatggtttttttctttttcttgagcgatttccattggctccttcctccacgatctgtaatcgctttcattttcttgtattagaaatctccaatcaaggataggataccctaatctatttagcactgtcaatcaattttagcaattcctataatatgatgagaaagccctaaaaaaagtacaaaaaaagaggaggtttccctcctctcatcatacgcatgaattatttagcaatttttgcgaagtattcaagagtacgaacaagttgtgcagtgtaagacatttcgttgtcataccatgaaacaactttaaccaattgtttaccgtcaacgtcaataactttagtttgagttgcgtcaaacaatgatccgtaagacatacctacaacgtctgaagaaacgattggatcttcagtgtaaccgtatgattcgtttgaagctgctttcatagctgcgttcacttcatcaacagtaacgttcttgtcaagaacaactaccaattcagtaactgatccagttggaacaggaacacgttgtgcagctccgtccaatttaccgttcaattcagggataaccaaaccgattgctttagcagcaccagttgagttaggaacgatgttagcagcaccagcgcgtgcacgacgaaggtcacctttacggtgtggaccgtcaaggatcatttggtcaccagtgtaagcgtggatagtagtcatcaatccttcaacaacaccgaagttatcttgaagagctttagccattggagccaagcagtttgtagtacatgaagcacctgagataactgtttcagtaccatcaagaatatcgtggttagtgttaaatacgactgttttaacatctgatccaccaggagcagtgataacaactttcttagcaccaccagcatgcaagtgtttttcagcagctgctttagtagcaaagaaaccagttgcttcaagaacgatttctacaccgtcgttagcccagtcgatttgttctggatcacgttcagcggaaactttaatgaatttaccgttaacttcgaatccaccttctttaacttccacagtaccgtcgaaacgaccttgagttgtatcgtatttcaacaagtgtgcaagcataactggatctgtaaggtcgttgatgcgtgtaacttcaacaccttctacgttttggatacgacggaaagcaagacgtccgatacgaccgaaaccgttaataccaactttaactaccattcgtgatttcctccttatgaaaatcaaaaaaattttttgtgaaaagagtaacttgacacagcgccaaacatcttttaacagtctctattatatactttattgcattaaaaagcaactatttccccacgaaaagcaagatttatcatagatcaccacctcttttattgaagtttttcacaaagtcttgtttgctaggaagagcacttttttacttgtattcacttttggaacaaagaaaaactcttcccaaagtgggaagagtttttaagcattggtaaattaagcttcacctttagcttttttaatgatttcttcttgtactgattttggtacatcttcgtagtggtcaaataccatcatgaaggtaccacgtccttgagttgcagaacgaaggacagtagcgtaaccgaacatttcagcaagtggtacatatgcacgaacgatttggcttgcaccgtgtgcttccataccatctacacgtccacgacgagcagttacgtgacccataacatccccaaggttttcttcaggaactgtgatggttacaagcatcattggttcaaggatagctggttgtgcagtcttagcagcttctttaagtgcaagagatgcagcgatcttgaaggcagtttcagatgagtcgacatcgtggtatgaaccatcgtaaagcttagctttcacgtcaaccattgggtaaccagcaagaacaccgttcgccatagattcttgaagtcctttttctactgcagggatgaattcacgtggaaccacaccaccgacgatcgcattttcgaactcgaatcctttaccttcttcgtttggagtaaattcgatccaaacatcaccaaactgacctttaccaccagattgacgtttgaagaatccacgtgcttgtgtagaagcgcggaatgtttcacggtaagatacttgaggggcaccaacgttagcttcaaccttgaattcacgtttcatacggtcaacaaggacatccaagtgcaactcacccataccagagataactgtttcaccagtttcagggtttgtttcaacgcggaatgttggatcttcttcagccaatttttgaagggcaatacccatcttgtcttggtctgctttagatttaggctcaaccatcaattggataactggttctggaacttcgattgattcaaggatgatttttgctttttcatctgtcaatgagtcaccagttgtagtatctttcaaaccaacggcagcagcgatatctccagagtaaactgtttcgatttctttacgagtgttggcgtgcatttgaaggatacgtccgatacgttcacgtttacctttagaagtgttcaatacgtatgaacctgagttcaagacacctgagtaaacacggaagaatgtcaaacgacctacgaatgggtcagtcatgatcttgaaggcaagagctgcaaatggctcttcatcagatgctggacgttcttcttcttcgtctgtatctgggtttacacccttgattgcagggatatcaagtgggcttggaaggtagtcaagaactgcatccaacatcaattgaacccctttgttcttgaaggcagaaccacaaagcactgggtagaattcaacgttgattgtcgctttacggataccagctttcaattcttcgtttgtgatttcttccccttcaagatatttcatcatcaagtcttcatcagtttcagcaactgcttcaaccaatttttcacggtattcttgagcttgttcaaggtattcagctggaatatcttcttcaaggatatctgtaccaaggtcgttcgtatagatttcagctttcatcttgatcaagtcaatgattccgcggaagtcatcttcagcaccgattggcaattgaattgggtgagcgtttgcttgaagacggtcatgaagtgtgcttactgagtaaaggaagtcagcaccgattttatccatcttgtttgcgaatacgatacgtggaactccgtattcagttgcttgacgccaaactgtttcagtttgaggctcaacacctgattgtgagtcaagaacggttacagcaccgtccaaaacgcggagtgaacgttgaacttcgatagtgaagtccacgtgtcctggtgtgtcgatgatgtttacacgagtgtctttccattgagctgttgtagcagcagatgtgatagtgataccacgttcttgctcttgctccatccagtccatttgtgacgcaccttcgtgagtttcaccgattttgtgaatcttaccagtgtagtaaaggatacgctcagttgtagttgttttaccagcatcgacgtgagccatgataccgatattacgagttttttcaagtgaaaattcgcgtgccatgaggtttgtttctcctatattttttatttctatattctattataacatgatttaataaaaacggataggcaggacctacccgttttcagtgttttcatgctaagttttggttccaacttgtaagaagagttgaattgaactcgggctaaaagctcaagttaactgatttgaacccgagcgaggcccggtgcaaaaaagataaactgctttgtgttcatcgaacactgcatcagtttcctatttttgccttgggcctttgccgctcttagtatcattttattaccagcggaagtgtgcgaatgcacggttagcttcagccatacggtgagtatcttcacgtttcttaacagctgcaccagtgttgttcgctgcatccaagatttcttttgcaagacgatcaaccattgtgtgttcaccacgttgacgagcgatggttaccaaccaacgaagtccaagtgttgtacgacgttctggacgaacttcaactgggacttggtagttagaaccaccgacacggcgagcacgtacttcaagtacaggcatgatgttttccatagctgtttcgaatacttcaagagcatcgtttccagtagcttctttaatttgttcgaaagctccgtaaacgattgaagcagctgtaccacgtttaccatcaagcataacgcggttgataagacgagtaactaattgtgaattgtaaagcggatctggcaatacatcgcgtttaggcgcacggtttttacgactcatttttctttatcccctttccttatgcttttggttttttagtaccgtatttagaacggccttgtttacgatcgtttacacctgcagtatcaagtgctccacggacgatatggtaacgtacccctggaaggtcttttacacgtccaccacgaagaagaaccacgctgtgttcttgcaagttgtgtccgatacctgggatataagcagtcacttcgatcaagttgctcaaacgtacacgggcaaatttacgaagggcagagttaggttttttaggtgtcattgttccaacacgagttgcaacaccacgtttttgtggtgaagaaacgtttgtttgaacttttttatgactgttgtaaccaacgttcaaagctggtgatttagatttttctacttttgatttacgcggtttgcgaaccaattggttaattgtaggcatctacattctcctgtgaaattttttatttttggtgatggtacacttggtgacagctaccatctgtgtgtacttttgcaacatttgtcagcacgtccctgtacactcttgagagaccaaaagtaaaaagtaccgtttattattataacatgacggcactttgattgcaagatgtttttttattttttaaagaagtcgaaaaagttcattattgaccagcttcagcaggttcttctgcccctgcatctgtggccggagcatactgctgttgctgttgtggttgaactgtcgcattggctccagctactccagcattggcattggcattagtatttgcgttcgcgttcgtgttggcattagcgtctgtttgagtctgctgtgttgccgctgtgtcgctctcataggtcagtccataatagttagcgatgtattggatacgggcctcaagcgattgcttttgagtcgcatctttgactttcttcacagcagcttgggcagcgttcacagaatcttgacttggagttgtttccatttgaacgactgctttttcagcagcttctgtatttttcttttcttccttcttttctttttcttcctttgtttcctttttcactggaagggaacctgtttttttagcaggttgaatttctgtcgttacctgggcagccgtattctttttaacggtatacaaaccagctaccaaaataaaggatagagacagaactgtcaccaagcgaatccacaaaggactattatcaaatcgatctaaaattcttttcactttttgatcctcctttgttgctcttaatcaaagatattcccaacttcgacactcaatttgttttcttttacatcgatgttggtcacgcgcaataaggatttgtgttcaaagaattcacggtcggttgcagcattatccgcaaagacagctacccccgctaattcagaatcgaattcagccaagagactgaccatcccgttaatcgttccgccacctttaaggaagtcatcgacaatcaagacccggcttcctgcttttaggctccgttttgaaaggaacattttctcaatgcgatccccacttgagcctgaaacatagttgacactaacggttgatccttcagtgattttcaaatcacgacggacaatgacgaatggaacattcaagacattcgctactgcattagctagaggaactcccttggtcgctacggtcatgacagcatcaatcttcctgtcccggaaggctttggcaatgatgcgtccgatccgattcaaaatcttaggattgctcaaaagatcagacaagtaaatgtagccaccaggaaggatacgatcactttcagacagttgcttgcaaagatcctcaacgatttctttggattcttgatctgagatagacggcgtaaagatcacgcctcctccagctcctgtgatggtctcaatatttccaatttccatctcttcaaaagcccgcttaataatcacgatatcttctgagatggaagacttggcagactcatacttttctgcaaacgtattaaggctagtcaattcatagggatggttgatcaagtaattagaaattacgaccatccgttcacttcttcttaatttcattttctcaccatgtagttttttctatcattataccataagaagcgaaaaaaacgaacattctgatttacagaaggccgttttttcctgattattttatttttggcagaatcattcccgtatttatctctgtttttactagtcgagattcggtttatagaaggaacgattttccatagcaaagattttattggtcatctcgccaggaccaattaagccaagtgctgttgtcatcatcatcatttctgcatccaaattatcgatcatatgaataatctctgcttccatgatctttggacgaacaggactaccgtattcgagcaaaccatggtgactcaagatcacatggcgaaggacgatgacttcttctttttgatcatcaatcttcaagtcttgcaagaccttggtgatttcttcatcgatgagtgcaatgtggccgatgaggttgccccgaacagtgtattctgtattttcaggtcccgtcaactcgatcactttggccaaatcgtgtaacataatccctgcaaagagcaagctcttattcaactgaggatagatatcgccgatactatctgccaagcggaccatggttgccgtatgataagcaaggcctgcttcaaaggcatggtggttggtcttagcagctggataactataaaattctttctcatatttcccatagagggcacggacaatccgttgccagactggattttcaattttgaaaatcatgtttgacaagtattcatgcaattctttgggatctactggtggtttttccttaaagtctgctggattgttgggctctcctgcttggggcaagcgcatgtttaattggttgacttgcggagtattattgtaaacttctcgacgtccagacatatggaccacgcgcccagctgtaaagctctctacattgtggggttgggcatcccataatttgccttcgatcgtaccggtctcatcctggaagacaaaggcgaggtagtttttcccggcccgcgtttgacgcacttctgctgacttgattaaatagaatccttcgaacaattcatcttttttcatttggctaattttgaccatcatcttctccatcttctatatatacatctagtcccagcaggtcctcatcgctttcgatttggcggagtgtccgctcgatggcactagtccgtctggttagcaaatcatcaatattattggaagcattttttaaatggcgctgggtcttggccagaatccctccaaacttgtggaattctgatttgaccgatcccaacactttactaatatcgtctgcactcttttggatgttaagcgttttaaagccaacagacaaggagttcaagagggctgatagcgtacttggaccagccactaaaatttgttcgtcccgacgcaagcgatcgaagaattctggattgcgaaccacttcggaatagaggccttcagttggcaaaaagagaattccgaaattcgttgtcgctggtggaaagaggtatttttgttggatatccttagcaaaacgcttgatactagcaagaagggccttgcggtaacgctcgatctcctctttctctccggattcataagcttcttccagacgatagtagtcttccagtgggaatttagagtcaatcggcagatagactggctcctctccttgtcctggaagcttaatggcatattccacgcgctcactggattggggaacggtgacaaactcccgctcatactgggctggggtcaagatatcttcaatgatttggcccagctgcaattcgcccataatcccacgcgtcttggtattggagagaactttattaagagttccgacatcccgcgccaccgtctgcatttctcccagccctttgttgaccgactccaattgttttgaaaccgtctcaaaggaggtctgcagacggtgctgcaaggttttctccaatttttcttctaccgtttggcgcatctgttctagccgcacttcattggactcttggatctggcgcatgcgctcatctgttttgtcccgatttttagtaaagtgctcattcatctcagcgcgcagagctgtcgtctgctggtggatctccactcgcatctcggttaaacgatctgtcagagcgatctctaactgctgattggcaatctggcttgcttgtctttctttttcaaaacgatagtccaactggtctgtcaaatgatcctcatggtcttccagcatctctcgtaaagccggtctggtgtcatctgaccgttgcaagagatagatgaggaggcccagattgagcaggccaatcagaagcagaatgatattcatattaacctctgtctctactataaacaatgacaagatagccacggtcaagactcacttgaatcggttgatccaaaaattcattggagccatacatggccttcaaaaaataattctcctgatggagcggatacttggctcctgtgatctctaagtggccttgtccgacaggcataaaaccaacataggacatggctggatctggctgaatctcatggcagccggctggtctgtagatcaagcgattttgaccgtcgactaattggatttgctccatgtagggagctaggtatggatcggtcggcaaaaagatattggacaaaaagtgatccaagcgaccgccaaaggcaccataaacagtgacagcagcctctggataggcctcaaaggccactttcaaagccaattccaaatccgtatcgttcttttcagggatggattgaacaacctgcttggcttgggttcggatctggtgcaaatcggtcccagagacagaatcgaaatcccccacagctatatctaaaggcagaccttgttccagtaacttcaaacagccaccatcaacgcctacataaacgtcatgatctcttggcaagagcgtactgtcacctcctgccagtattgcgatgttacccatttacagcatctcggagcgtttgaacacgctcattgacatctccattaaagacataagagcctgctacaaaaacattggccccggcttcttttgcttgggaaatactttgactatcaattccaccatccacttcgatatcaaagtctaagcctttttcttcacgaagagcggctaattcgcgcaccttgtccatggtttcaggcaagaaggcttgaccaccgaatcctggattaacggtcatgaccaagacttggtccaccaagttcaagacatgtttgatactgtctacaggagtccctgggttgatcacgacactagccttcacacctgcttgacgaattttttgaagagctccgtgaatatggggagtagcttctacgtggatgctgatgatatcagcacctgcacgggcaaattcttcgatatggtgttcgggattggtgaccatcaagtggcaatcaaagaccaacttgctatgtggacgcatgctctctacgacaccagctccaaagctgatattgggcacaaaatggccatccatgacatcgatatgggcatagtcagctccagctgcttctaagcgtttcaattcactttcaaaattggcataatcggcactcaaaattgagggtgcaattttcattgttttcatcgttgtagtgtctcctattttggcatttttttcgaaacttttttataggtttctcgacggttttcaatctcacttagaaattgcaagtaatcctcataacggaaaggcgcaatttcctctctttcaacggctggtttcaccgcacaagcgggctcatgcgtgtgggtacaggtacgaaatttacaagagtggctcacatcggcgatctctggaaaggcttgatttaagtcttcactggtcgtcacttcataatcgagggaggagaagcctggcgtatctgcgatctttcctccatttaaatggtaaaagctgacagctcgggtcgtgtgtcgaccgcgccccagactatctgaaatctcacccgtttcaagctctagatccggagcgattttattgagcaaggtcgattttcctacaccggtctgtccaataaagaccgtggtttgattggtcaaaaggggcaagagttcctcaattgacaagacaaaatcatagccaattgcttgatagatcccttggtagtagtggatgtcttccatatcttctaacaagtccagttttgaaatatagacaatgggatgaatccccttatgctccaaaagaaccagaaaacggtctaaaagattggcgttgaaatctggctccttagctgacatgatcactactgcctgatcaatattgacaataggagggcgcacgaggctattttttcgaggcgcaatgctcaagatgtagccttctgaattctcttcagcagagaactccacctgatcccccacataaggagtctgtcctttttttctaaaatttccacgagcccgtgtctggtaaatgtgaccatctgactccacgtagtaaaagccagccaaggccttgacgattgttccttgcaaatcgcactcctttgagattaatactatctattataccaaaaaatgagaaataaggctggattgctcaataagaaaaaacgaaaagtgaacctctccggacgcttttagaaacgaataggttcgttttttaaatggatagaaacagaagacggagtatctgttatgacttgtcttttagcagaattcgggaaagggcaccttcctttttttccttggcatttttcctaaaaagtgtataatagaactatgcggaggtggtggaacggcagacacgcatgcttcaggcgcatgtgccccttcgggcgtgagggttcaaatccctttctccgcatcttggaaaggtggcccagctcggtacggcaccggactcgaaatccggcaagtggattttcttcacgcgcgggttcaaatcccgtcctttccttacgatacagataagagtctgggacaaaagtcctttagctccaaaaaagcaacggatttgccgttgcttttttggtactaggcgactattgccccagactctttttttaatttatgggatattattgtcgacgtactttatttatataagtcagtaattggaggagtagctgattaattcgatatatgataatagacatcggaggtgtcaattggctgtgattgaacagccataattctaatttgatttttatcagaattatctataccacttctcgtaataatgctagttccaatagggtatataattatactacctcctgaagaatttgaacctacttgtaaaccaattataccattagttcctccagcattagcactggtaatagtccctaaatttaccaaccctttattatcaaagataatttgttgccctgatgcattttgccaaactcctgcaatgcttgtatagtctcctcgtaggattgcatcggtatcaataccctgtatctctggttgtggtgtactttcttgttgctgtaattttggtgttggtgctggtatagcttctgtgaccacccaaaattgaaatttctcagaatcttccatgattttaactgtgaaagtgattttcattccttctgtccagcctgtggtgagtgatttcatgatttggatctcaatacctgagataggagcattgctagccttaacccaaatggagtagtaaggattaagtttcttgaaatgtcccgaataatccgcccattcgctttgtctaaaaagttctgctgtgaaacggtatcgttgccccgtcttaagcgttccatcgttctccatatctcttagagcctctgctgaggtttcaatcacaggtgcctctggttcactgctagaagaggaggaatttgaggaagaacttctgtaagaaaattcagaggtgtttttctttgaagaactttgctttgtgacaacttgtgtggagtcgtccctgtgattgagaaaccaaagacttgtaccgcctatcacaagagctacaattgtcactatcactgtgtaaatccatggcttacgtttttcacgcactttcatcactatgatttgatctttgttctggtaaacctctactatatcattgactttgggcttgaatgaaagttcattcaaggcaacttttgtggtttcacctgtgttgagaaggatatgtgcgtgtgtaaccgtgatgctaatgattttgtgtttagatcttagtttcatgatatttcctagttttcgtatatgaatccaatcataaatggaacaggttttggtagttcgattccttcggtaagggattcattgtcgtcagatagacctcctgtattaccatatagagtaatttggtcacctagatgaattggttcctcgtaattaacgtcaaatatagtaactagaagtattttattttcgtcattatctacggcaatttttagagtacggctagcaaatcttttgacttcttgcaatacttttcctttaactttagcttgtgttccgttagggatttcgttattgctccacttttcaaaattaactggtatatagtcagatttattcttctctgtagttgacaattcagatgaagagtcatcagcagaagaacttgaagtagggttatttatattcttagctgtatagtagttatctgcgataatttcttcaatctgttgctgagaagttttaccattgataccaataatgtcatccttatgtacatcacctaaatacttacttttaggtattttcacagtagctgtaacaagatttgtatgttccttgttaaagatgttatttgcattgttattaaatataaactcatccagctcaccgatttggaaagttacatagttaccagattcctctggttcactcataacttttccataaccttgtacagtgagtcctctggctctgagatagttatctatggttttaaatcctttggtagagtccacatggttaaatgttactaagtaaaagatactaaaaactactagtatgctcagagcagataatattgaataacgtaagaactttgacttgtttttgggggttgattttactatgggagagttttgccgtaatttttttgtagaatggagattagatgatttaatgataatatctccataaacttcaactatttcaccgattgtgaactctgaatctagcgatgaatgagtaaattctttcatcgtaccgtcattaaaaccaacgtagatatttgtatctgttatcttaataatttttcctatattcatttttattatctcttaatcttttcgttctacgccctgaacacttccactattattagcacttaacacattgacaccatcaatagtgactacagaaccgaataaattaactgtatctcccacttccattttcctatagtgtttttcgatatattcttctgtgtctcttgtgagcaatatttttaattcatcttcatttttgaagtaaaattcattaatttctttgtcttccgttaaatcaaaccatatcggtcttactttgataatagtaccaagaattgtatcagtgtcttcaatctcttcaaccacacccagtgtctcaaagctatctttctctcgattagatatatattcatcaaatgtcatatcagcggtaaaaacatcaattatcttaatagctattgagtcagaatcttttactattttcccttccatggttacccatttgtttccagatggggagtgttcatctggattttttatggtattgattttcagtgtttctcccatatattttgcaccatagtcgactccatttacttttaacaccataatattcttaatttcagttggactgtcctccatcatcggtatattgaactcagcttgtatagatatacttttaccgatgttatctttgagcaactgatttagtttggaagaactagagagttcttctgttttgcttgtctccatgcgactagttgagttatttgtatttgttaatgtgtggtgtgtgagtgaagcaatgattaggatggctaatgaaagtacaagatatatgactgtagttagtctagggaagagatttttcttgaatagggatagaatcaaaagaaacagatttaagatactaagcacaagagggaataaaatgaaaactattgttaggatattgtgcagatagttagtaaagtctgtaaaggcgagctgtagcattgtaagaagaacaaggagtatgaaaataacaatgatattgattctagttgttagagatagtctcttgaatctatttttaatagagtctgacttaacaggaagattagattttgttacaaaatctccataaacctctacaggatctcctaatacaggtttaaattcaagagatgtgcgtgaaatttccttgacagcaccatcttcatatccaatatatactgttgtatctgtgattttaattatttttccgttcattttatccccaagtagtagcaccgataagtgcacctatccaaatacctagaatcattgttccgattgaagcaatcataatgatagtcccttgttccttatctcctctactacgcacaagatagcctaagatgatgccaataattccaaaaactaaaggtaaaagtagaagtgaggtgccagtacaaatccaaccccaaacttttaatgcagttgtattgcttggtttattctcagcggtttgttgaaaagtagattttcgcttgataatgtaactgccctctgtgccataaacttccacttcatctccaacttctgggagaaaatcaaaatattccctttcaatttcaaggagagttccatcggtttttccaaggtatatggtttcgatattgtcttttaaaactttataaacattcatttgattttccttttctatttttctagtcaacttttttaaatattcccatgctttaactagtgtcgttggtaaatagtttgaatatcattttttatgactctgtattgtactttcttttttacattatgactttctatagtagttttacatattaaaagtatgtttttttatcataaaaagacttatttgtatttaattatatcataaaaacacatctagagtattttttataaaaaaataaatacaataacgccctgacgttttgagcgaataaagggtagcctatatcttatagaaagaacataggagaataaagcatgtcgttgagcgaaaatgtttccaaacgaatctatgagttaaggacaaataaaaagatgacacaggagaagttagcagataaagcaggcatggatgtcaatgctctgggacgaattgaacgtgggcaaaatagtaatatcaagttggaaactttagacaaaattatccgtgctttggagatagactatagaaccttcttttcattttctgtgagtgaggacactttttctaaaattgcgtccaagctatcgctagtagctgacgaggaaagatttctggaaatatttgatagaatactggatattgagttaaaatgagtagaaattaggtataaataaaaagtaccaaacagtaatttctacttgcctgctgaactcatcagtaatgagaatttttgtactctttttgtacactttggagtaaagtctagtatttttttaattttttatccggagaaaattccttgtgaatagtcgaatagaagagtagctaaaagcatttatgggggataaggtgggcgaccaaagtcatgacatagggcgtagaagcgactatcctccaatgtattcattactttttcaatagtaaagacgagatagtcttgtggcaagaaagaactgatttttagtggtaaagttttttgatttgtgtcatagcgaatatgcatgagatatattttttaaatgacttactgatcaattctatttgaccaaggctatcgaatccatgcaaaaagcaacggcaaatccgttgctttttttgagccaggggatttttgtcccagcctctttcttttattttattcctgcttctagaagaccatctgctaagcgggcgaaatcttctaagctaagagcttctcctcgcacagatggttgcaggcctgcagcttcaatccctacttctagtttggctttgatttcttcggtcttgccaaagcgactagtcaagttgttccaaagcgttttgcggcggtggacaaagctagccttgctgacagagaagaagaaatcttcatccttgacggccactgctggttcttcgcgacgcaccatcttgaggatggcagagtcgacatttggcgctggcacaaagacggtgcgtggtacgataaaggccaccttagctgtcatatagtattggactgcaatagacaaagacccataagccttggtgttgggctcagctgaaatacggtcggccacctctttttgcatcatgaccacaaattcttggaaaggaattttagactcaatcaagtgcatgaggatgggagtcgtgatgtagtatggaaggttggctactaccttaattggaagttctggatttttaaactctgcgatgtactggttgagatccaccttgaggatgtcttggttgacaaccgtcacattatcaaaatcacgcaaggtatccgctaagatgggaactaagcggtcatcaatctcaaaggccatcacttctgccgcattttctgccaaaaactcagtgagagctccaattccgggaccgatttcgatgacattgacctgcttatcaatctcagccgtatccacaattttttgaaggatgttggtatcggtcaagaagttctgaccgaaggattttttaaaggtaaaaccgtgacgctccagcactgccttggtcacgctataatctgcaattctcatgtattctcttttctatttattagctaaaaacaatatataaaacccacataattcctagtgccaacacaatccaaaacactaaaagaacacgagacttgttcccttgtgaatcggctccagtcatatcgatcgctttcttatcttcttgggggttcattttcttcagttcaccctgataggcaaccgaatctagaatattgtcttctggcaataattctgaagcataataatcaggaaagcccatagcaagaccaattaagttcttttctgtcaaagaaaaatctaaatctttgggttgattttcccgaatagctcgtatattttttaacagtttatcagaaacaacagacacttggtccataaaaacaacatctaagacatcaaatccgagcacatcaccatcttttacgtttgcaagaatataacgaacaaaggcatcatataattgtaaggtctgagaagcattttcttctaaaaaagaccgattttggagggcgttttgctggaatttttcaataggaagcaagatatctacattctgctcttggtaaaatctttctgcttgttcttcatcttcttcaagttcttctgctgtttcccagagagcaataggagcttttaaatcttcttcatcccaaaacaattgccaaaaataaggtatcgtgtaaattccctctgttaagatacgagcttcatctccgttttttaagtaaatataacttctattcgccattccatttcctttcaaaatctttgaaaaaggttagtggttcaggtaagatgtagataaaactatatagtttcccaatgaaagaaactctctaatctttatctctgccttctagttcctcactaaacttttgcatttccttaaaagctgttaggctaacataggcacccgcttcataatactccgttggatttatggcatagtcaaagccttcaatcatgccaccagcttcttcaatcatgccattccacttttcatcaaagaccattcgcagacgtttccaatcagtaaatactggcacagaattgcgcccatcttttccttctctgactgggatgctgaacttagcgtcttctttcaatacaaaggagttggctccctgactcttatcggggaatcccgaagtagcatttaaaggaatgaggagtttggcttttggcatggctgctgagaagaatttataatagagcttatatattacttcttcgtcatctgttgtaggcttatccatctgccccatcaacagcatccatcttacaatatcaggattcataacaggaacttgtatctctggtaggttcgaaaaatctggtttctgaaccaaaacagaagcactaatgctgacttccttggtattaaaggctgctcccaaagctccatttaagtaaaaggctgtcccaagaaaattctcaattccttttttatctgctgtattttcaatcagtttcacaactgaatttggtcgacgatcaatggtttccttaaattggtgataccaacacggcgtatatagcatgatcatcgggtctgaacagagatagccctcttcacctttatcataggtcgttgagaaaagatacgcttcccccgttttttctgaaaagaccgcgtaaatcgaatctgctgctaacaacttgtccttgacgatttctgctaggcgttctagctttcgagtgttagcttgatagctttcttcactttcagttttctgattttgacggcactcccataaaaagaggcgcaatatttctatgctatcatcaagactagcggcttgatagtcttgattggacatttgacctttttggacaattacaaacgcgttataaagagcatctgtatagcttgatagccgttgttcctcatcgacaccataactatagagaacacttccctttttaagattaaccaaggaagtttccatatcgatgaccaaatgagctagagattcatccgtgagaacatctacatccttattttgattaatgagttttttcacgactacagaaccaagagcgtccataccttgatcaggattgcaaaattgcagacaatccccaaccttgagtccgccctctaagctcccaataatcaataactcattcgtctcctttatcggaaatagttctagaactcccaagcatgttttgtcaattgactctactgttttgtttgttgcttcagttgtttctgtcttttttaaaaaatcgaagattcccataaattatcctcattatctacactcataacaaatcctatggagtcacttttctaatgcttgcaaccaagcctgattaaaccgtatatacttacttctattgcgtcatcttccccttgcttttgggggagtttctcaattctcataacttttcatggtagcttcaacctcagccaaacaaattccaaacaactccaagcgtttgatcaattgcttgccattgcagtagccgatgcgcaaggcttctcctagatattcccgtcgtttgcgactatcgttgcccatcaacagaccaagacgcatcaaatcagtctttgtgatatcaaagaaattctcatcttcataggagcccacaagtccagctagggctttttctaagtcttcaaaactggcatgctccactcccaaggaacgccccttagtcttggatttggggactgcttcgccacgatttaaaaaggcatgcttggcctggggcacctcttgcataatgatcttgcgaattcgctcgccattatagtctggatcggtaaagacaatgaccccacgcaactcttgcaaggtagcaattcgttccaagtcatcttgatcgatcgcagaacctcgcgtttcataggtatccacctcataaaaacgacggagattggctgtgtcgtccttgccctccacgacaatcacttctggtatttttcttttctcagtcaaggccaaatacctttcttgcattgtcataggttgcctgagccacttcttttgttgttaagccacgtagttctgcaataaaatctaccacataacgagtgtaggctgttttattttcccgaccacgtttgggaactggtgccaggtaaggggcgtctgtttcaaccaagatcttctcgagcggaaggccagctgccgcttcttggacatctgttgccttcttaaacgtcactactccagaaaaggagatcatcattcccagatccatgaagcgtttggcttcttctagacttcctgagaaagaatgcatgatcccaccgcgaggaccgactccttcactcttgatgatggcataagtatcttctaaagcatcgcgtgtatgcaccacaaaggggaggtccaagtccttagacaattgaatctgacgacgaaaaaccttttcttggacatcttttggtgccgtcatccagtggtaatccagaccgatttctccgagtgcgacaactttgggatgtttcaactgttcaagtaaataggcctccacttcaggactataatcgcctgcctcagtggggtgccaacccagcgtgagatagagttctgggtgctggtctgccaaggctattcctcgctcaatcgtcggtttgtcaaaaccaacgatattatgggctacaacgcccatttccttggccaaatcgagctcttcttgttcttttcctgcgaattcttccacattgagatgggtgtgggtatcaaaaatctgcatgatcttccttttcttccgagtttttcttctttctattatagcagaaagcgcctctaaattcactttcggacaaaacaaaaaccagtagtctcgagtttctactggtttttaggtttttatctgaattacgcagccaaaactttgcgtcctttacgacgacgagctgccaatacgcgacgaccgtttttagttgacatacggttacggaatccgtgtttgcgcgcacgacgaagtttacttggttgataagtacgtttcacgatgaatacctcctcatagattttgtattcgtttagccggctagttgtgatcagttactaaacatactttactattctatcggattccactctatttgtcaatagctatggcaaaaatgttgcaaatacaggtcggagaaaacctttctacatctgacgggttgccaagtaatagggttccagagccagtagcgccctttgcaactgatccaggatatcctcaagagaatcttcctcaactagagaaatatcgtatttgacgaggaccttacgaaccgccccttctgctactgcttgcaacagatcatggcgatttttttctgttccttctaccctttgactctctccatttttctggacgaaataataaactgactgagtgatgggaagggtgagaaccatgtgttgtttttgaaggctctgctcatctttttttcgctcgataaaactcacctctaaggaaactccaaaatcaactacatctccatagagcctcaaggcaaacataggttctgccatcgtcccttctccttttagataggcccaaaaatgaggccgcaagacctgggcctggttcatccattggctggtccgatcctgctccaagtaagggtgacactgctgaaaggccgagactaaatcggtgaattccttacgagccgcttgagctagggcacgatactgctccatctccgaggctagcaccccagcctttgctggggcctggtagtggattccttgaagctttaaaaactctcgaatcgctacaaatgccatttgcttcctttctaaacctaaaaaaggagagatcggctcaatcccgtctcccccttatgggaaataatagctagattatccttcgatgtctaccaccacgtaacggtttggttcttccccttcagagtagctagtgactccttccatcttagagacgatccggtgaatgattttgcgttcactgtttgacatcggatctgtctgttgggcttgcccatcttcgagggcacgtgttgccaacttctgagcatagctttgaagaacttctgcccggtgttctacatagtcattcacattaatggtaatgtaaaaattctttgagtagcggttatagaggtaattttgcgccaaaagttgaagagccttcaagacttttccgtggtaaccaatgacacgtcctggttcattggtatcaatttgcatattgactgtacggcggttgtgactacttgagatggtcgcatccacatccatttcatcgaccactgtttgaacataggctgtcacatcatctacgacttcttcgatgttgtagttttcctctacctcgataccaaggtttgagaaatcagattcgcttgattcttttatcgctggttctttgactttttcaaggatatgttcatgtcctttttcttcaagaacggtatccgcttctttgtcatgtttcaggatttcggtcttgatttcttcagagacaacttctccttcttcttcgacctttttgatcgctgcaacgacgcgtccgagatcgaccgttgcttcgctcaccgtcttcaccggttcgttttgtgcattgatctcatctgggacacctttgacagctttttgattggcttttacaacagttgtttctgcaatgggctcaatctctacttgggctggttttttcccaaacaagccaagaaaacctttcttttcacgcgctacaaccgtaatatgtgccttcatacgaggaatatctaaatcgttcagacctttttgaatcgcttcttcaacagttgctccagtatataggaccatatgtccacctctttcttattttttctttttctgtgctttgtttagggcacggcgtttttgtttttccatgtcgcgcgaagcttgctcttttgcttcacgctctgcaataatcttgaaggggttgttcaagagataggtttgcccgacttggtaagcattggaagtcacccagtatagtgcgaccccgctggctgagaacaaggcaaagaagaagatcatcacaggcatcacatacatcatggttgtcgcactaccattgcgctctggcatggctttattggtcaaccaactgctgaaaaatgtgaagagtgctgcaagaaccggcaagatataagtcgggtcgatcgcgccaaggtccaaccagaggaagtgaccgactttaaggaattcgacacggctcagcgcttggaacaaggccatcaagaccggcatctgaattaagagaggaaggaaggctgaagacgttttgacacctttttccttgtaaagggcccgcatctcttcagaaagcttagtccggctatcgagatccttcccaggatacttagcttgcaattccttgaggaggggttgaatttcctgcattttgcgggttgaattcatttgatattggaagaggggcaagaggaccgtccgtatgacaatggtaaagacgataatccctacaccgatacttccgccaaaggacaagaagcggatagcttctgcaaagaagtagacaaagcgttcccaaccacctgtcgactgagctgtcacttgagaggttccacaagctgtcaagaccaataaggccgctcctaataatccagttaacttcagtttctttttcacattattccctttcttggtagacatgcgctaattttaaaacatgtacaagatttttctctacttgatgaaagtcgagctcctccactcctttacgagcaatgacaacaaaatcatcggtcgtaaggaaggcttggtgtttgatcaaaacatggcgaatcaaacgtttgatgcgatttctggtcacagcatttcccagtttcttactaacagacaggccgactcgaaaatgcggttggtctttgcgcaagcggtaaacaacgaatttccgattggcaacattttgaccacttttaaaaatagcattaaaatctttgtcacgtttgacgcggtagctttttttcaaacctcaactccctctattaaatttattctattataccatattttcaaaaaaaaccaatctcactcaggaaatcggttgctacttgaatacagataaaagcaaaggcaaggtgtagtagagattgagcaagatatgagccaaaataggagcaaggagcgtcttgctccgataatacaggatcccaaaaatcatactcggcaggagatagatgatagaagctcctagcgaaaagggattgtggagaaaatgtaggccactgtagatgagggctggaagccaaatctcagcatagagtttccagcctttgaagtaggcatttaccaaggctccacgaaagatcagctcctctgtcaccggccggatgataaccattgcaatcactaggataagcacacctgttgggctaatttcccgtggaaagagactcaaaacggctgctcgtccttgaacaaaaccactgatgaagtagtccaaccagtaaaccaaacaggccgcaaaaacggcttctatcagagcttgaagagggttcttccccagcttaaactgcgcttttttagaaaaacgatagaccaaaaatcctgtaaagactgcatagaggccttctaggccaaataaggtccaataatagctatttgcgcttgctacactattggagacatactgggctaaggggcgaaattgaggccgaacataaaaataaaacaagagcagaaagaggggatacagcagcgagagctttcctttgatgaatttcatagatacctttcctataaagtatgacaaatcgtatagtgcatcttaccataatcgtgacaaggtttcaatgaaaaaggatgccttcctactctctgagataggctacataaccacctaggatagcgactaaaatcaagagacaaagaagagtttccagccatacgagagctgtcaagaaaggcagttgcaacaagccttgggccattttcaaagaggtcgctgtgatgactgttggaaaggtcagggctgaaaaagcaggttgaaaaccttctttgatcattttcggtaggcgcgtcaaaacaaagaaataaaaaccttgcgaggccaccaccatgattagtaagagccaggtaggcaggcttgctccacccacacgaaccagggctgctaaaagaagggaaaagggagcacaatagatgccttcttggcccaatagatgactgggtaaaggggactgcttcaaatcatggtagataaggggataaagaagaaaggtcaaaccaaaaccaatcactaaagcgagataagcaatctccctgattcctacaacagggtaggtcaaggctgctactgcaatgcccacatagagaacggtccaactgggagtggcattggctcttggtcgcgctaggacatgggtcttggtaaaatagagaattaaacccagatccaagagaaaggcagaccaccagaccaactgtgatagacctccaaaggcgggaaagaggcgcaaaagataggtggatagaatcatccctgccatgggaaaagtcgccatcccagataaaagggctggttgttggaattctatcttggtttcttgccagcgaatcgcatgataaacgacaaagaaaaaccagaagaacaaacctgtcagactaaaggcgtgagcaaggaagggtagcgagtctgcaagaaggtttccagcgccaaccagtcctaacagacagcctgaaaatactaaggggatctttttcatcggaagctccaatcattttatcgctttcagtataccataaaagagaaggaagcaggataaaaaagagagtgggacagaaatcggtaattcgttagaattcgatttcgtcgtcccacctccgcacagttgagtagggctgtaaaagctgatgaaatcagcgtagtagagcccactcaaccactgcgtcttgctcgacaatccaaaaataattgagaggctaggacttttgtcccagcctcttcaaattgtagatatttctttaattttttaagtatcatttaggttgcattatgtaagaaacagatggattacattctaaaagaagttggagaataccaacttctttttatccattctattagaaactaggcctgtacgaccatcatataaagaaataaggatacgagaaagacgatactaacaacgagggtcgctagcttgagtccacggtgggagcgccagtaacttggctttcctaggttactggtcgcatctgttgaaagcgattgttgttggcgaggctgcaaggtgatcagaaccacaagagcgagggataagatcgagatcccgattgcaaataccatttccatcttaggatcctcctaacactctgaagagggtaaaaataactcccagcagaatcaccaaaccaatgatcacattaaaagtaacattgatcttttcagaacgtgtcgtcttttctttttcggcaggacggcgtttgagagactccatccgtccttctacttctttgtaaaataaatctttcttacgatcactcactgtgtccacctatcccttcttgcaagcgagctttgaaaacagctggctcaacgctacttgattgggcaatttgttgtgcgacggcttctctgtagttatccacagattggtagatttcctggatacgggccaccatatctgcttcttttccttgatcaaagatattggcttgtgcgaggaagtggcggtcatgcagggtatggctaaaggcaaggatgacttgctggtgttcgaaggccttgcgaacaataccttgcacctctgcatagtggttgatatccagataaatactagagaccttaagcaactctttgatccgctcttgactgatattttggtacaagactacatttggatagcgaaccatagatagaagactagcagacatctccgtcaaagctgctacacggaaggtcacattcggcaagttctctactaggtaggtcaaggcttcgatctgatccgaattagtcaagacaaaggcgtctttacggatatcgtctttcaccttgaaatcatacagatatccaaggggaccgaagtagctatgctgatcttgcgaggtcaactgcaaagcgcgatgataggtcgcgttttgcggaatcaagatcttcttggtccggatttctgggctctttagaatcaactgcatgttgcccggaaggctgtcgtgaagaggctcctgccacaccaagacgtcgcgtcctttgatgcctttattgcccagctggagactaatgctaaaggaggtagccagcgtattgtagaccaaaccatctagatcaaaaccacgatactctagataaaagacaaagtaatctaagcgattcttgaaaatccgcatcggttgatggtccaaggtcaagatcaaatcccctgtttggtgattctctgtcaagcgctcggtatccccttcaaaataagtagtcaccaaatgctgaccttgatcaccacaagtcgttacagcaatcttacgaccgtattggtcatagtgctcaatcatgaccacttgccccttatcatctaaccactctaagcgctcgacgatgcgtttataggaagcagcatggtacacaatccgagccttttcttgaccatagtaggtcactttccccgaactgttatccccagaaacttcccagaaatcaggcactggaacttcattaaagtagcgtccccgcttctccccttttgcttgtcctaagaaatagataaagggagactcgacaccgtctggtaagaaaccatttggctccaaaataacggtcggatggtcaaaaccagactctttcatggagtggagcaggtcttggctttcacgagaataactatcaaatacgttcagcatgtgtcacctcttctatcaattgtgcccaagcttcttctactcggctggtcaaaaagtcttctgcacgcgcataagatgcttgacgcatgctggatagatcatcttttttgtatagctggatcattttttccgcaaaggcagaagcaatctggtcgaccacttgatctgctgaaggcggaatgagatagccatttttaccttctgtgacaaaggtctgattgccataaggaacatcaaaaccgataatcggaagtccagaaccaatcgcctccatcaaggtcaacccaaagccttcactggtcgacgcggacaggtaaacctcataattcttataaatttcctctagattggcatgccctttgagatggatatagtctgccgcccccaattcatcaattagagaacgcaacttgccttcttctccaccttttccatagatgtcaaaagacagttctggcaattcttttttggcgcgaaccactgctcgcaccaaccaatcaatatgcttttctgtcgctaaacgagaggcggtaatcatagaaaatggggtgcgattttcattttgtggcaagcttgcaagactcccaaccggaatggtatagatggccggctgatggttggtgtatttagcaaactgctcagccaagatttctttttggcgatcagtcgcgacaataaagaagtctaccttgtctgcattggtaaattggtactcgtagtagttgttccacaggatatactgatcatcaacattattggcactgaagtgctcggcgtgaacgaccacacccagacgggctttttgcgcttcttcaaagataggctgaccgatattagtttcccgatccaaaatcaccagatcttgtttggtcaattgaagagtttgcatgaagtagcggatcaattcttggcgaccaactaggtagcgatctgggaaacgataaatttcgcggccatctgccatctgcatgctgtaggcaaccgtcccgtcttcattgtaaaaacggcgctcaatcaagttggcttgattgtttttgggaataaagtactcagtacaatagcgggtataggagaaataatcctttctcaccaaaattcctctagacacgtactcgcaacgttcaacatagggactgttttctgcgcgcaggtagcaggtcaaaaagttgtcctggtcctcataaaagaagcgcttgatcttaccatcgacttcttcacgagtcggttttccggcaaatcctgctaagacctgatcaatggtataggtcgttggcgcaatttttatatctgtaaaatggctatagagccagatgatttcatcatttttaaaaccgatattttctgttaaatgttggatattatcggctaagatcatatccataaaaacaaacttggctggttgatggatattgcgtaacaactgggcacggtaggcctgggcatactcaacaccactgctggcccaaccgattccaaggttgatattgtatactgtcataatgtcctcttttatgggaaatgcaagacaatttccccttttttattgatttctactcgacttagtaagagattgcggaccatttgttctttggccgcctctttcattcgttcaaaggattggtaggcttcttggaaaaattctaccaaagggtttttctgactggtgtactgaccagagagcgccatgcgcaattgttgcagatagtctacctgctctacccagttttcatcgatagcttttaggatggccatgcgctggaattgggcgatcacctcgtcggtgcctaagatctcatacttggcttctaactcgcttttagcaatttcccataagaaattctctttggttttcttgctacggaaggtttggtgggccttttccggatctacttggtagctaacattgtctaacatatagcgataaaaagctaccggttccttgtattcttttttatggactacgcttgaaaagacggaacgaagcactttttcaacgatatcatccaaacgtccttcttgtttgatcaagcggtcgcgctcttcgtagacgatggcacgctgaatgttcatgctttccgcaaattctagcgtcatccgacgactggcctgaccagaactttcactagcattctgggcccgttccaccaagtttctatacttgcgcttggtcagagctttggctgaaccaatccgctcatccacatcatagtcttgataggtatcctggatccagtctggtccccagtttttcatcaaatcgtcttccaaagagacgaagaacttggtcaaaccgggatctccttgacgacctgaacgtccccgaatttgaaggtcaatccgctggttcatcatccgctcagtcccaacaaccaccaagccacctaactcagcgactcctggtcccaacttgatatcggttccccgaccggccattgaggtcgcaaccgtcacagctccttttcgacctgattccttaatgatctgggcctctcgaggagcattgttggcattgagaagattgtgtggaattccttcccgcaaaagaaggttcgaataaagaatcgacatttcaaccgatccggcaaagaccagaatcggattgcccttttcgtggaccttcttcacataatccaaggaagccacgattttttccggcaaggtctgatagatttcatccggcaaatccttgcggatcttcttgcgattggttgggatcttgatcactgacatggcataggtatcaagaaactctgcctcagcgaccttcccagtcccggtcatgccacccaacttccgaaacatcttaaagaggttttggtaagtaatagaagccatggcccgtgtttcttgggtcagcttgagaccctctttagcttcaatcgcctggtggagtcctccttgcaagcgcgtcatttccatcaagcgacccgtcgcctggtctagtaagacaatctccggttgcccttcgacattgggatgaatgacataatccttatccttaataaagtttttattggcctgcagggctaagctgatatggcggaccaagtcacggtattggggatcatagaggttgggaatagcaagaaaagcttctgctgcatgagctccttttcgagtcaaccaaactcgtttcttttcttcatcaaacttgaagtcttccccttctttgaaggtttggatcagggtatcaataatcccataaaggttggactggacccgaggagaaccagaaataatcaagggagtctgagcactatctagaagcactgaatcaatctcatcgacaatggcgtaattgaagtctgccaaaaactggccatctgctgaagccgtcaagttctctgttaaatagtcaaagcccaaactggtattggtcgtataaatgacatctgaccggtaaatctctcgtttgacttctggatctaattcttcgtcttctgattgtttcaagggaactccaacagtcaagcccaaaaagcggtagacctgtcccatctcttctgcatcccgagttgccagataagtattggtcgtaataaccatgacccctttgccctctaaggcattgagataaactggcatagttgccgtcaaggtctttccttcaccggtattcatttcagcgacattgccttggtggaggacaattcctcccatgacttgcacgtcataaggaaacatgcccaagacccgtttatcggcttcccgcgcaaccgcaaatgcttccggcaagagatcatccaaggtctcacccttagctagacgttcccgaaattccacagtcttctcctgtagttgtcgatccgtcaagcgggccatgtcatccttccagctattgacttcttttaagatttttttgatgtttcttaatttaacgtaatccaatgtaatcctctttttttgcagtgatgttcgtctattcgagaacttctgctccctcagacgatattggttgaatcgtgaaatagtggaaggtaaactcttgcaaacctgcactgagcaagcgtacttcataggcgtatgcttgatctggataggtaaacggcaagcgaccttctgcggttactcgacggccaacgacctctccaaagcgatctttaaagatgatttctaccataacggtatgagcgggagtcgcttccatcgtgataaccagttcataatcttgctctcttttgagcaggggcagactcggaatttgacgagttgcgccaaaatttgtctgcgaatgccaagttttcagcacttgaccagatggcatgagggggttctgaaactgaacgcttccttgggcagtcgcctgaatggtcgacccccaaagataatctgctagaacagtatcgccccagtagattcgtctgctttcattttcttttatttttatcattggtttcttccaaagtctctttccatgatttctttgtactgggtcacaaaccactcaatgatcggaccactcgcatcattgtgtcgaccggcacggctagtgctgataatacgaaccggcaattcatacaaggcctctaaaatatctggataagcctgctggtcatagtcatcatccctcatataggcaagggctaaaatcgtatccttgaaatctgcctggtcaaaccggtcccagaagcgttgattgagctgaccgatcccttcttgcgacacttgaccaatgatcaactgcatcatgtctagggatgttccaaactcatctggacgtttaaatttcaggttggcagcgacatcccccaggttgacaatgggttttccgaccaagatcgcatgaggagaataaagagccccatagtaaagggcaccaaaggtccccatggacaagcctgagaaattcatatcttttggctcaaagccgagcaagtccaagtgctgatcaataaaggcagtgatttgactttccaattcttctgagcccatatagaaggatccaccttccagccttgggtcagaaaagagaataaagggactccccatcgcacgcatcatcccaaacccttcaaaaccttcggccggacgatacccagaaaagtaaatgtttaaaggtggtttcatatcgccaggatggaaataagcaaaaatttcttggcgtttgtggtcccgtagcgtcttagctcctacggtcatctctcctaaaggaccatgtgacaagcgcttatgtagggctccgatcgtaagcgtcccttctccttttgcttccagcgaaaaggctaggtaataaggttctgctccatccaattctagtggttgctccatctcttcttctgaaaagactgcatctttgacccactctcccagagcaccaaagcggtaaaattggatccgcaattgcagctgacagcttggatctttttcatattccaaccaaaaattgataggacggctagcgtcatacacataattgtaaacccactgaacaatcggcgtaaactcttccccatatgctccgtcaagcttgaggaaatgttgccccaagactgtttgctgaccagcaaaatcaggtctcacctgcagatcacgaactgtaaaggcatctccgtattgattgtcgtataaaaagcggtctaaaacatagagaaattgatgcttgtttgagaagtcccagggtctcgcttgtttaagccttaagaggtgggctaattcttcagaaggtgcctctagcttacggctttcgtcataaaaaacggtataaggttgaaaataagtcaggtcttctcctaaagccaacaaatcttctggattctctaaaatcaaggctttaaatttagagatttcctcttcttccatatagtctttgagcgatggaagagcggtggcttgaaaaaagtgccagccaagtccagcaggaagttccatttgatcctgccagctgcttgagccgatttggagaatatggggtatttgtagttttttatccatgacgttctttcatccatccttcccatttctcgatcaagcgttgaccggtgtattcttggattttttcgattgagtagaccaaggcttcattccaaggcttcaattccaataagaagtgcgtgattgctttttctaattccttgtctccctttgataagacatagccgtttttcaaatgatcgacatattctgtctggacgcggttgacctgaggaatccccgcagagatccctgcaatctgcgtatagaggttgggctcctcgcttaaatcgacaattaagcgagttttttccaactcttgaataatgtcattttcatttgaaaaattcttaaccacaaaacggtaatccggtgcgtcttgtacagactcttcatcaatgatttggttttctccaagcccttctgactgacttggcgactgaacaagatgcaagtcctgctcactagcaatcaattcctcgagttgcccttctaattccttcacccgctccggtgatccattgtaaaatgcaaaaacaacttcaaataagggatgttgcgctaaaatttccagaaccttcttgagctggctcttacttggaagctcggcttcgttgacataaaagtaaatcttggattccttgcgctcctgactagagcccaaacgaaggcgggagtcaaaagaggtaatccggtgtgtcttttgagcgaggctaggggaaaagcccccaatcgcttttttggttttttcactatctgtaatcaagagctgggcatcaatcatatcaaaatagagggcaaagttttcagcagataagggctgacgatctccatagaaggacaagactttcttgacactacttgctgtatcctgtaagaaagccaaatttgctggatgagctgccagaaccaactgatctcgtcctggaaccaaggctgccaactgttccttcatcttttcagcgacaacttctcccatatcggaatagctttcttttttgaaggcaggaaagaaagcctcattgaccataacagattggttctcttcgatcaacatttctctcaaaacccattgtccatcaaaactaagatactcttgaaaataaggtttcctctcattgtagtaaattctactagagataaagccacgatcatctaagtactcaatgtagctgatctcatcattcttataacgagtcaaagagagaatgtttccatctactcccatatcaatttttgctatgagacgaccctttcgaaatgccattaccaaaaagggagtgtaggaaaaagtggtctcactcgtccattcgatgtcccgaagctgaactgggtgcatcgccaaactagacggaaccttttggatccgatcaaaaatcgaaagcacatctgtctctaacaaatcttggcggtgtaaaaaatagcgcagttgcggactatattggggcaacaataagatccgatccatttctgcttcttgaaaaatacgaacttgattaatggtatcatcaaattcaatggattctcgcatccagtaccaaggggtagctgtttgctgccagatgcggtccgttccataccaggctggtacaaaataatacatggttactcctagaatattcttgtataacgttgattgacacgaagggcacgaatttcttctcggatattgtaaatcatcccgacaaacatgaggaaggtccctggaatcatggtcaagcgcaaaagatctttatcccataacaagagggaaaaaggaagcgccgtaaagaggatcagatacaaggtcccaaaaaccgtcaagcgtagcacaattttattgatatagcgacgtgtatctgctccaggatagacatgatcgatatactcggacgccttcatcatcttatctgcaatttcttctccgttcacattgacaaaggcgaaagcaaaagagagaagggcgatcatcagaatgtaaagaagaatccaaatcggatctcccatcaccaagtgtttggctaaatgagcggcccacttggcattggaatccatagacaagatcaacagcatcgcgtactgaggaatggacaccaaggtcatggcatacatgaagggcatccctcctgctgggttgagcttgatatccaaaaaagtataacttttcaaattgttgtggattcctaatttattgacaggaatctggtacttggaatattccaccaagactgccacatagacaaaaatcaagataaaaatcacgcccagaacataagcgatctctggtatattattgacacttgaaagagtctgcatcacgtcttctggaagatacatcaccatcccagccatcatgatcaccacagaacttccaagccccaaagcggcatttagatctgagagccaaactagaaagaaggctccggctaccataatcatggtattgaccgcaatgacaagtccggagttcaaccctgtcttcaaggggagatacatggccactgccaaggactggacaatggcgagtgccaaggtcacgtacatctttcgccgctccacaatttccgaactggttttttcgaggttaaagcgttttgaaacggtaaacatccgccacaaaatcatggaagacatccacggggatagaccgatcgaaaagatcgacattccacggaggtttccccccatcacagcacttgagagctgtaaaccggttgtcgttccctcattgagtctcaaggcctttgataagtcaacaaaaggcaaggaaattttacttcccaaaacataaataaagacgaaaaatatcgtccaacaaaatctctttcctacttcagatcgttttaacatttcttttaaactttctcttactcattttgactcttccacctggggaatatccttttaatatatgcctttagagcattttatctcaacttattttaccataatttgcgacttttccaaactcatttgtcactaatatttgataatatttcaaattccccatttggtactgtattcaacaaaaaatccttcagatgtttatctaaaggattgttcattgaatgttattcatccaaggccatgatggtatcgacgaataatttctttgtaaaatagccattgcggatcaaataagaagtatagtgagccttttggaccatttgggcatacgcttcttctgtgcagtcttgaaccagacgattagcttcttcaagactagatgctacaaagccaagccctttttctcgaatatagtctgcatttgacaaatagtctggcactactactggaagaccagcagatagataagttgatagtttgtaagaaatattttctttgtagtaatcccgctcatcctcaggattctctgaatttccccagacaagcccaaaaccacccttggaaagttcgagaagcaactcttgcttagtccgccagccttccatatggatcttagaataatcgactccttcaactggttcagtatagacatgaaggggtgtctcatatttccaatcgatgatatgtgggaaacgcgaaggatttcctgagaagatcagttttttctcaaattgcggagtatagagatccaaactgtgggtcaaatcccacaacttttggaccacatattttttcactgtgagtccttctgatactagacgatggtacatttgctctgacggaacaacgaccaaatcactctgattgtacatgtcgatatagttaggcattaggtaataattgctctcaaacatgagtggtggaacatcatggataaacatgaccagcttggtttgaaggagttttaacttatcaaccaaacggcggtcccactcaattccattccaagaaggagattgaacgaagacaatatccccaaaagcaacgcctgctaaaatcccatccatccgcgaattcaattcgctagctggttcattgctatgatcataaaagtagatccctaattcattgaccccaagttcacgaacgacattcataatatcgttttgtgccatcagggcaacacttttcgaagattgcccaaataaatttgtaaaatggattttcatctctttcctctgactcttcttttttaatcccatattttctgaagatatgaaggcaaacagagctttttacaaagtaacctttttcatatccctcaacgaaaacttcctcattcattataacatatttcccaacttcttagacattctagatcaataaaagaccggttcattccggtcttttaaggttttatttgccatcttttttccgaattcctaaaagggctaatccagacagaagaatggaagctcctgtagcaaggatattagatgaaggacgagaacctgtctctggaagagcagatcctgaagaatgcgtcgcagttagtgagcttgcatctgatggagattctgagtaagaggtgccaaacgaagacacgacagactccgaagaacttgtcacagcagagaaacttgacgcataagacacactgatccattcagaaatttcctgcgataaggattgactctctgttgatgatgcacttctagaatctgaaacactcgtcaaaggaaattcagatactggcatggacgttgaagccgattcgcttgctgaaaggagtgaagctgattggctataggagtcagattttgaaacagatgttgacgctagagattctgaataggatgtccattgtgaagcagatagactatcagaaacggatcgagagaacgatccagactctgaaacctgcgatgcagctacgacatgagaagttgaagctgattcgcttgtcgaagcagaagcttgaactaacgaatctgattgactcgcggacaccgaagcttggaccaacgactctgagtggctattagagatcgaagcttggatcaacgattcagactgacttgctgaaactgaagtttggacttgtgactcggactggctcgctgaaacggattcttgaacttgtgactcagactgagttgcagaaatcgaagcttgtactaaggattcggattgactcgcggaaaccgaagcttgtaccaacgactctgattgtctattagagatcgaagcttggatcaacgattcagactggctcgctgaagctaaagcttgaacttgtgactctgactggctcgctgaaatcgaagcttgtaccagtgagtctgattgactggcagatactgaggtctgaaccaaggattcggattgactcattgaaacagattcagacagctttttgctcatcgaaatagattgcgacaaggaaatcagttgagaaaccacttcttccgatccaaccgccgatgttgactgcgattgagacatagaaatggatctagacgctaaattagataaggataccgactgactcaaccaaacagatttcgaggctttttcagactcactcttagatgccgattcagaagctacttttgattgcgattctgattgactggctgagactgatgcttgtaccaacgactccgactggctcgcagaaacggacgcttgtaccaacgagtctgattgactgacagaaacagattctttaatcaacaattcagactggcttgcagaaactgattctcgaacctgtgattcggattgacttgcagagatcgaagcttgaacttgtgattctgactgactcactgaaactgaggcttgaacctgcgagtcggattcactagctgaaacagactctcgcactaacgagtccgattgactcaatgatgttgatcgcaaatcagtcgatacttgcgattccgactgactcattgaatcagaacgagaaaaggacatagattctgtattttgagacttagattcgacatcagaagtagattgtgattgactcactgaaacggatgcttgtaccaacgactctgattgactggcagatacagatgcctgaacctgcgagtctgattgactagctgaaactgattcttgaaccaatgaatttgattcacttgccgaaaccgaggcttgtaccaacgagtcagattgacttgctgaaacagattcttgaaccaaagactcggattggcttgccgatacagatgcctgaacctgcgattctgattgacttgcagatacagatgcctgaaccatcgagtctgattgactcgcagatacagatgcctgaaccaaggactcagattgacttgctgaaacagattcttgaaccaaagactcggattggcttgccgatacagatgcctgaacctgcgattctgattgacttgcagatacagatgcctgaaccatcgagtctgattgactcgcagatacagatgcctgaaccaaggactcagattgacttgctgaaacagattctgacagctttttgctcatcgaaatagattgtgacaaggaaatcagttgagaaaccacttcctccgatccaaccgccgatgttgactgcgattgagacacagaaattgatctagatgctaaattagataaggataccgactgactcaacgaaacagatttcgaggctttttcagactcactcttagatgctgatgctgcttttgattgtgagtcggattgactcgctgatacagattctttaatcaatgactctgattgactcgctgaaatcgactcttgaaccagcgactccgattggcttgaagaaactgattcttgaaccaaggaatcagactggctggcagaaacggattcctgaagcaacgactctgactgactggcagaaactgaggcttgaaccaacgagtcggattgacttgccgatacagatgcctgaaccaacgactcagactggctggctgaaaccgagacttgaaccaaggaatctgattgactggcagatacagatgcctgaatcaacgagtcagactgacttgctgaaacggacgcttgaaccaatgaatctgactggcttgaagaaaccgactctttgagcagcgactcagactggctagcagagactgaggcctgaactaacgaatccgattgacttgctgaaacagaggcctgaaccaacgaatcagactgactggcagaaactgaggcttgaatcaacaactcagactggcttgctgaaaccgacgattgaaccaaggattctgattggctagacgatacagatgcctgaaccagcgaatccgattgacttgctgaaacggaggcctgaactaacgaatctgattgactcgctgaaacggaggcctgaaccaacgaatcagactggctggcagatacagacgcttgaaccagtgattccgattggctggcagatacggattctttaatcaaggagtctgattgactggcggagctagatgcttgtgacaaggaaacggactcactgaccgaaacagattgagaagatgaaacggattctgaaactagtgactctgaagttgaaatcgagaagttttgagattgtgaagcagattctgacggtgtcatcttccgatagtaatagttcacactcgttaaggggtatgaatctactatttttttgatcgtttgtttgaagttggaaaaaccatctgctccttgaggtgttgcatcttctcccacgaccatggtcgtatttttatcgaggtaggccgattttggaagttccgtgaatggttttggaacagtatattctattcctgttttctcatcagtgtatgtaactgtctccttactagagaaccaacctgtaatatccaactcaaaatgttggtaatctattcgttttggtgtaacattcaggaaataatccttgtttttactttcaactttacgagttccacctaaatctgaaaggttatccgtactatcttgtttaaattctttttcataaacaagtgtatatacatcggttaccttagcatttcctacatcaccactactaacatcatggattttagaaggatctaaaacatagtagcgaagagaataatcaccattttgattaagggtgacaacttcacttttaatgaaatgctcacgtgcatcccctaatagttcaactcttgatttcccattcttgctattatcgaacaccccactttgacgatttgggaatacggtatgcgctgggacctgtacataaccaggaaattcgcgtggattagaagctgtataatgctggccttccaatccgtagattctatactctagtaaggatctttctttccccgttggttcatattgcccattgaaccatctaccattcgggtccacttctctatagaaggtcgattgttgtcccatcatagatggaattttgatactaggatacgtcctaatcaactgcccttgattctcaggcgtcatgacatcataaatactccggaataagaaagcctgttccggaataaaattcgttagcattccaaaggtcccattacctgtagaaggttccgaattaaaaaccttgttcccaaggggagcctgaccaattagtacttcttttggtaattgaatatcttggccatatccttctggagatacagtttgtgaaaaaatttcagccccatctgatttccgaacaatgcggaaataaacatccattgccttatgcttttccgggtctatctcactgatatcaatcgacatggtcgcatagtaaccaagtgactctccttgtttattcacaaagtcccaaataccaaatgtataacgattggtgtagggctcacctaaaaaatttttcaactcttcaggcgaaaaccttaagagatctttatctagatgaggatccttagcatatcctggtgtgtcaagtgtaggatcttctacactcgcaccattgggatcttctgggttcgggctcatatccaatacatcatcagccaagtatgtttcctcagctagaggtgctaactgagcagagatcgcaggtttcccatctacatttgtatttcccacaaaacctgcagctgtcaaggtcgtcatcatctcatcgacagctttctccaaacgatcgcgctggtcagcataagcttgagcactggcattggtatggatcaagttattacttgcagccacttcggcctgcactttgttaatgaccgcttcgaccactgctcggcgatcggtgtccgtcattttagatgcgtaattccctgcaatttcttgaagcaattcagcttcagaggtattttgttctaaaacagtggcttcttctaaactagttggctcttcaatacctgcttctgactctagagcttgggtagactcgctaagtgctgttgataatgcagttgatccaacttcgctcaaggataaagacgtggattcactgatcgaagcagacgcactctcagatgtagaaaggctggttgatcctgaaacagagctggattctgaaggctggcttgaagttttcgctaaaaccacactatccacttctgccaaagtttcctcttttgtctcagaaaccgttggtgcaagtgatgttgcatcctccgccttagctgtcgtagcaagcacagcaccaccaaaaacagtccctaccgtaatcaacccttttaagaaggcttggttattcttttgactttctatttgatcttgctgtacgttggcaatgatggtctcctccacttgcccacgcaccacgcgaaagaggcctagagcagctgttgatgctcgaagccaattttttcctgatttaattaatttgaagcgtacgacacgatctgtttcacgaaagtttccttttgaacgcttaaattgcatgatattccccttacattgtagtcattattcattatacagcaatactacgtagattcaagtaatttgctacaaaaaacttatatattatcgtttaattttcaaatttttttgtaacacattaaaaataattcattctactaataaaaaagtgaatctcctatgagattcactcgaaaaaatgatttttcctactagatcagctccccttctttttacgtcgggtaagtccagcaattccagctaaccctgtaactaccccgagaagagctgatgttacagatcctgtttcaccagtattcggaagcactacagaccggctgtgtttttgtgatccacttgctgattctgatgcagacaatgactctgaacgagaaattgattggctcattgagttagagtatgaaccgctaccagatgttgatcctgattgtgattgactcactgaaactgaagtacttactgatgttgaagttgattcaggtgcagaggtactcaatgatgctgactcagatgcagagactgattctgacgctgatgctgattctgacgttgaaaccgattcagatgtagacactgactcagacgttgagactgattctgaagtagacaccgattcagacgttgacacagattctgatgttgatactgattcagacgccgaaactgactctgatgtcgagattgattcagacgttgatgctgattcggacgttgaaactgattctgaagtaaataccgattcagacgttgaaactgactctgacgttgatactgattctgatgtcgagagtgattcagaagcagatgcagattcggattcggacgttgatactgattcagatgctgacaatgactctgacgttgaaactaattcagaggttgatactgattcggacgttgaggctgactcagacgcagaaactgatttggaccttgatacagattctgatgtagatgcagattcagacgttgaaactaattcggacgctgacaatgactcggacgccgaaaccgattctgatattgacgctgattcagatgttgacgctgattctgacgtagaaactgactcggatgttgaggccgattctgacgtagataatgattcagacgttgacacagattctgatgttgatactgattcagacgtagagactgattcagatgctgacaatgactctgacgttgaaactaattctgaggttgagactgattcggacgttgatactgactcagacgcagaaactgattcggaccttgatactgactcagacgcagaaactgattcggacgttgaaactgactccgatgtcgatgctgactcagatacagatactgacatcgaaactgaaaccgaagtagagactgactggctttctgatactgaattgctcaacgatgctgacaatgattctgatgtcgagattgattcagacgttgaaagtgattcagaagtagacactgattcagacgttgaggctgactcagacgcagaagttgattccgatgttgaaaccgactcagaggctgacaatgattcagagactgaaactgactcagatgttgagactgaaactgaagtagaaactgactgactttctgatactgaagtgctcaacgatgctgacaatgattctgatgtcgagattgattctgatacagaaaccgattcagacgttgaaactgattcggactctgagactgattctgatgttgaaactgattcagaagcagaggctgattctgatgctgataccgactcagattcagaggctgacgctgattcggacgtagatactgactcagagactgagactgactcagatgtcgatactgattcagaggttgaaactgactcagacgctgagactgattcggacgttgaaactgattcggaagttgatgccgattcagaagtcgagactgattcggacgttgaaaccgactcagacgctgacactgattcagacgttgaaattgactgactttctgatactgactcggattctgaaactgattctgatgttgagactgactcagacgtcgataccgattcagaggttgagactgattctgatgtagaggccgactcagaggctgatgctgactcagatacagaaactgattcagacgttgacactgattctgatacagaaaccgactcggacgtagacactgattcggatacagaaaccgatgcagacgctgagactgattcagacgttgaaaccaactcagaggctgaaattgactcggatgttgatactgattcagaggctgaaaccgactcagacgtagaggccgactcagaggctgaaaccgactcagacgtagaggccgactcagagactgatgctgactcagaggctgacgctgactcagacgctgattcagaagttgacgctgactcggacgcagaggctgattcagagactgagaatgattctgatgttgaaactgattcagaggttgagacagactcggatgcagaaaccgacttagatgcagaaactgattcggatgtcgattccgattcagacgtagacactgattcagatacagaaatcgactcggatgttgatactgactcggacgttgaaactgactcagacgttgatactgattcggatgtcgagagtgattcagaagcagatgcagattcggatgttgatactgactcagacgcagaagctgattcggatgcagatgccgattctgaggtcgacactgatttggatgttgaaaccgactcagaggctgaaattgactcggatgttgagacagactcggatgcagaaaccgactcggatattgaaactgattcggatgctgatactgactcagaggttgaggctgattcggatgttgacaccgactcagacgtagatactgattcagaggttgaaattgactgactttctgatactgactcggattctgaaactgattctgatgttgagactgactcagacgtcgataccgattcagaggttgagactgattctgatgtagaggccgactcagaggctgatgctgactcagatacagaaactgattcagacgttgacactgattctgatacagaaaccgactcggacgtagacactgattcggatacagaaaccgatgcagacgctgagactgattcagacgttgaaaccaactcagaggctgaaattgactcggatgttgatactgattcagaggctgaaaccgactcagacgtagaggccgactcagaggctgaaaccgactcagacgtagaggccgactcagagactgatgctgactcagaggctgacgctgactcagacgctgattcagaagttgacgctgactcggacgcagaggctgattcagagactgagaatgattctgatgttgaaactgattcagaggttgagacagactcggatgcagaaaccgacttagatgcagaaactgattcggatgtcgattccgattcagacgtagacactgattcagatacagaaatcgactcggatgttgatactgactcggacgttgaaactgactcagacgttgatactgattcggatgtcgagagtgattcagaagcagatgcagattcggatgttgatactgactcagacgcagaagctgattcggatgcagatgccgattctgaggtagacactgatttggatgttgaaaccgactcagaggctgaaattgactcggatgttgagacagactcggatgcagaaaccgactcggatattgaaactgattcggatgctgatactgactcagaggttgaggctgattcggatgttgacaccgactcagacgtagatactgattcagaggttgatgctgactcggacttagacaccgattctgaggtagacaccgattctgaggtagacaccgattctgaggttaacgctgactcagacgtcgagactgactcagaggtcgagactgattcagaagcagaggctgattcagaagttgacactgactcagacgcagaagctgattcggatgttgacactgactcagatgtagataccgactcagacgtcgagactgactcagatgtagacactgattctgacgttgacactgattccgacgctgagactgactcggaatctgatgctgactcagaggttgatgctgattcagaagttgacgctgactcggacgcagaggctgattctgacattgaaaccgactctgaagtcgaaactgacactgaagcagagactgactgactttcagatactgaggtgctcaacgatgctgacaatgattcagaggtcgagattgactcagacgttgagactgattcagatacagaaactgactcagaggtagatgccaactctgaggttgaaattgactcagacgtagatacagattcagagactgaaactgactcagaggtcgagactgattctgaggttgagattgattctgacgctgagacggacactgacacagattcagacgctgagactgactccgatgttgatgccgattcagaagcagacactgattctgaggctgaaactgactcagatgtagaaaccgattcggatgttgatactgattctgatgtagatgctgactcggacgctgagaccgattcagaggttgatgctgattcagaggttgatgctgattctgaggctgaaactgattcagaggctgacaccgattcagaggttgaaaccgacaccgaagttgaggctgattgactctctaatacggaagtgctcaacgatgctgattttctagcggactcactcaaagatactgatgcagactcagattgcgattggcttacggattttgaagccgactcgcgagtcgattgacttagtgactctgataccgactgtgaaagcgatgctgatgctgactgactcactgaaacagaggcgctcgttgaagcggatgtcgaacttgagacagactggctaaccaccttggatacactcgccgataccgaagcagactgcaaggcactgacacttgcagaagctgattcagaaaccttctcagattcagattttcttgtcgatacagattgactcgttgaagcggattgagattgagaaatctccttgctcaacgattgactgcgagatagacttgcttgagctgagacacttgcagaagctgattgacttagtgaagctgacaaactttgtgagcgaaccgagctcagtgactggctcaatgaaacgctctgctgagccgatacgctctgtgattgcttagcacttaaagactgactgatcgattgcgaagtcttcgcagatgcactctgactgtttgatacagactgactgtgatcgctatctgacagtttcaccgctacgacattggtcgtactatctttataagtaatggtgactgtaccatcactattaaccgtataggacttaatccggttagctacctctgggttgactgccgacacagcagcaatcaccttgctcttatctgcatcagtcaatgctgtcaggctggtcacctgaatagtgcttgtcggcgccacacctggcgtacgatcagcgagacgcccctgagtaatccgaatctcacccaaaccgtttggacggttcatattggaggcattgtcaatagccgcaacgttgcgttgccatgtatttcggtaggtatggtaaagatcatccttcaaatgaatggtcgttgtgatggttgcagggttcgcactggtagccgtaatatcacccgtgataagagcaatattaccagttccgtactggctactaccaaagaaattgccgttcaaggcattgtcattcaaatcggctcttgcaacgactttcatttctttaagcttgccactgtcatccgttgccgtgaaagtcaaaacagcatcatcgccagcatagatggtatagttttttccaccaccttcgagaggcgtagacttaggttccacaccatcgacagtcaacttggccgtcacttcaggacgcgttccgtcagttacagccacggaattactggcatctgaatacaccgcataatcaccatacatgatgcgagctttggctgttacaccacccgtttgtaacttaacagtcggcgtcacaatcgcttgacccgaagcatctgccactgctgttccgatttcatcatcattattgtacaagacaacagtagaccctggctcagcccccgtcaccgttacaggtgtttgagtataggctttctctagtaagcgagtctcaaccgtcggtgctgctaggcgcttaacaggagcagttacatcatttgtggtgttatctttataagtaatggttactacacccgttgctgagacggaataagacttaaagtccttagaggtcgcaatatttgggttagcagtcttaaaagcctcccaaaccttatctttttcggcttgagcgagattacttgtgtcattaacaaaagtactcgttgtcacagtcgtaatcggattacgaataccatcattttgcggcaagacctggattcgtagcgtacgtgtcactgactgcttagccgtattcgtcactacaaaagaaagattataaatttttccaggcgttacgacttctgtctggccaacagttcccataatattaaatgctactgcactatttcttagtgccgacgtctgaggaaaattgatgccattcacacgatcactaccagaagcgtagccaaggcttttaatactatttcgtgtaggaatggtttcaacaacattataagcctgattgatgtagtcagagttataaacagaaatcaaggcattgttagccggacctaaattatactggggtgcacggaggctggtatctgtgtcaatacggttcccatttcgagggtcgcgctgaccagatgtcgcgcgcagcaccgcgttgaccaaacgattccgagcggtttttgcttgactttccacggcatcgatttgaattgccggattggacaaacctacacgaatagcctccaaagccagatctccattttcaatagcagtttctgtcccagggatttccagagcctgtgcccgataggtgtataaatccaaagctaagacttgcagacgcttcacctggtcttccgagcgagtggtctgagccactgctactttctcactcgtttcagaagtagctacatgaatagcgtcattctctgagagagtgctactagcaatttctgaagtggacggactcgctgaagcactgacaccatgagattcactcaaagacaccgattgagacagagaaaggctttcactagctgactctgaaaatgagatggattcacttatggactgactcgctgagacagaatccacagcagacatcgtacccaaaacaaaactatcctgatcaacaatgccggtcgatgggctaatttcagacccaacagtcgtattcatctcattttcctcggcaaatactggattggcaaccgtggtcgccccagccagagcccctagcacaaccatccctttaaccagatccgcaggcatttgacgtgaagaatcatcatatcgaaccacaatattttcatccacaccacctcgcatgacacgaaataggcctaaccgagaaacagatgcccgtacccaattctttcctgatttgatcaatttataacgcgtgattcgctccgtttcgcgaaaatcacccttcgaacgtttaaaaaacatgttcgctccttaaattttagatatcgagttattatacactaattttccccaaaagtaactaattaagactagtttttaacacaaataacagcatacaaaaagagaacccggaggttctctttttggatcctttttcatttcccacatacttgaaatgaccgaatcaaattaggatagaagattatttttcttcttctttgcgacgtccaagtgctgcaactcctgcaacccctgcaactgctccaagaagagctgaagctacagatcctgtttcaccagtatttggaagttgttcaagagctggagctggttgagctggttgctcaggaacagggttcactggtgtattaggtgttggatctaccggtgtgtttggtgttggatccattggtttattaggtgttggatctaccggtgtatttggtgttggagttggtggcactggtgtgtttggtgtcttcacaagtttgtaaacgtaagtaacgttcttattaccttcgatgactttaccagttgttgggtcagttgtcgtcaagtgaccttgtccatcaactttacctactgggtaattaccttgtggtaccaattcatagactttaccatctggagttacgattgtcttaggacggttatccacaactgtatcgtagtctttacctactggttgatctttttcatccactactgaagtcttgatagtattaccattttcatctacatagtgaacgtatacattacccttaggttgagttggttcttctttcacttctttgtaaacgtaagtgatgattgagcgtggtttgtcaactttacctttaattggatcagatgattccaagtgtccatcgccatcaactttacctactgggtagtcacctttcggtacgatcttgtatgtcttaccgtctggagtcttgatagtattaggtttttcaccttcctcagttgtgttatatggtgtgtcatatggtgagtttggtgtgtcttgacgaggtttcttgatttctttacctttttcgtctacgtaagtgatgatgacgtcaccttctttaggtttcgttggatcttccttaagtttgtaaacgtaagtgacattcttatcaccttcgatgactttaccagttgtagcgtcatcacctgtccagtgaccttggtcatcgacttgacctactttgtagttacctgctggtaccaattcgtatgtcttaccttggaactcgattgtttgtggccggttgtctacgactgtatcgtaatctttatcaactggttgattttcttcgtcagtgacatcgtctttaattttgttaccattgacgtcaacatagtgaacatatacattacccttaggttgagttggttcttctttcacttctttgtaaacgtaagtgatgattgagcgtggtttgtcaactttacctttaattggatcagatgattccaagtgtccatcgccatcaactttacctactgggtagtcacctttcggtacgatcttgtatgtcttaccgtctggagtcttgatagtgttaggtttttcaccttcctcagttgtgttatatggtgtgtcatatggtgagtttggtgtgtcttgacgaggtttttgaatttctttaccattttcgtctacgtaagtgatgattacgtcaccttctttaggtttcgttggatcttctttaacctctttataaacataagtaatcttagaaactggtttttctactttacctttgattggatcagaagtttcaagatgtccttcactatcaactttacctaccggataatcaccagccggtacacgttcgtatttcttaccttcaaactcaatgtacttaggttgttcatcgttctcagtagtgtcataaggcgtgttgtagtctgacttaggagtatcttgacgttggactttaatttccttaccatcattttcacggatataagtaataataacttcaccttgaggtttttcactttcagaatttgatgaagagttagatgctgattgtgatacagatgtagaaagtgatgttgaagctgatgtgctcaatgatgctgattgacttgcagatacgcttgctgattcagatgctgatgtgctcaatgatgctgattggctcgctgatacagaagctgatgctgaagccgatgtactcaatgacgctgattggctcgcagatactgatgctgattcagacgctgatgtactcaatgacgctgattggcttgctgaagtagatgctgatgctgaagccgatgtgctcaatgatgctgattggctcgcagatactgatgctgactcagacgctgatgcgctcaatgacgctgatactgattcagatgcagatgctgattcagatgctgatactgatgctgatgtgctcaatgacgctgattggcttgctgaagtagatgctgatgctgaagccgatgtgctcaatgatgctgattgacttgctgatactgatgctgactcagacgctgatgtgctcaatgatgctgattggctcgctgatacagaagctgatgctgaagccgatgtgctcaatgatgctgattggctcgctgatactgatgctgactcagatgctgatgcgctcaatgatgctgacgctgactcagatgctgagacagattcagacgttgatgttgaagctgattctgatgcagactcagacgctgatgttgattcagaaactgattggcttgttgaagctgattgtgattctgaaacagattgcgaagctgattctgatgcagaagctgatgtgctcaatgatgccgattggcttgctgatactgatgctgatgctgaagccgatgtgctcaatgatgctgattgactagctgatactgatgctgactcagacgccgatgcgctcaatgatgctgattgacttgctgatactgatgctgactcagacgctgatgtgctcaatgatgctgattggcttgctgaagtagatgctgatgctgaagccgatgtgctcaatgatgctgattgacttgctgaagttgatgctgatgctgaagctgatgtgctcaatgacgctgattggcttgctgatacagaagctgattcttgcgctgacgtactcaatgacgatgattgactcgcagacacacttgctgattcaacagctgattggctcaatgatgtggaagctgattcagacaatgatgtagaagcttgttctgatacagactgtgagttagatacaacttctgataacgattgtgaagctgattctgatgctgaatttgaacctgaatctgattgagattcgtctttcaacttatagatataagtaacattcttctcacctgaagccactttaccagtcgtatcatcatcacctgtccagtgaccttggctatcaacttgacctactgggtaattaccagcttctacaagttcgtaagttttaccttcaaatttaatttctttagggcgattatctactacagtatcataatccttctcaagtggttgatcttgctcatcaataacagatcccatgatcgtatttccgttaatatctttataatgaacgaagacacttccaacttcctcataaacgtaagtaatggtagattttggtttgtcaactttaccagtaataggatctgaagatttcaaatgaccattttcatcaacacctcctactgggtaatcacctttaggaacaattttatatgtcttaccatcagtggtcttgatgatatttggtttttcacctttttcagttgtatcatatggtgtatcatatggtgatttaggtgtatcttgacgagatttttggatttcgttccctttcgtatctacataagtgataacaacttcaccttcttttggtgtttctttcactttatagatataggttacattcttatcttctttagcaactgaacctttaacatcatctgaagttgtaaggtgaccatctgagtcgacttgaccaacagtatatgtacctgctggtaccaactcataagttttaccgttgtactcaattgtagctggacggttatctactactgtgtcatatgctttgttgataggttgtttatcttcatctgttactgaagctttaatagttgttccttcagtatctttatagtgaacgtaaacacttcctttttcgtctgacttaacaaagtaatagttcacatcagttgaaggtttaactgcagatggaactgagtagttatttgagaatgaagtgaaacctttcaattctttgtaagtaactttaccagtggaatctgttactttgtccttcgcaacaatgtcagcattccgtccagcaatcaagttccatttgttatttccttgaccagctggtgttaatgatacatctggtgcacctgtaaatggttttgcgtatccttcagtcactttggtttcttcgtgcgtaagataaactttctccgtattagactgccaaccagtaattactagggaattgctacctgcagtttcgacaacatcaatatggtaatcaccgtttttgctatttacagtagtcgtttttgattcagtagctttccaagtatcaccagctttatttacagatgatgtgtaaataagtgtgtatttagatacatcttctgtaccaacatcacttgcgctgaagttacttacttgtgatgggtcaagagcatagaattttgtaacagttgaaccttccgtatcaacaacttcggaaatacgtttcacgtagtagtggtttgctccaccttgaagttcgacaagtttttgaccaacgacacccttaccaaggataccagatgttttttgagttgtatctgttgttgctggaacttgtttgtacccctcaatattacggtttcctgaagctgtaaattgttgacctgcaagacctgtttgtgtgtagcttgcaagatctgtttcacttccagttggtgtgtatgtttgaccttctttgtacttgctgctgtcaacgactttatagtgagttgtttgatcaactgtagcataaggaacagaagtttgaacgtttggcttgtcttcgttttcgttacctgggtagttggtatcacggatttgaagtgtttcgtactcaaggttagcatttaccaatgagaaggttacgttacctggatcagttccattagcacctgtgtaagtcaaagtattggttacatcagagttattgtttgtgatgtagcttggaagagagatattgctttcaccagcatgaatagtacgagtgtaagcttctgtaccatcagatttcttcacaatacgcaagtaaacatctgggttagctgaaaggctaccagtgatggcagaacggtctactgaaagagtagcataataatcaaagtttgttttcgcaccagtagtatggtttgttttaaggaattgccatacaccaaatgtatagcgatcagcgtttggatccaaagcataaccagatttattgaaagctgcatcttcaatcgttgcaccgttcgcatctgtaataactgggttagtatctacactaccagtagtgcttgttgagattggtgccaactgagctgaaattgctggagcaccgtttacagttgtgtttccagtaaatcctgctgcagtcaaggttgccatcatgtcatctactgacttgctcaaacgttcgcgttggtctacgtatgattgagctgaagcattagcgttgatcaagctgttgcttgctgtcaattctgtttgaactttagcgatggcagcttcaattgctgctttcttttctggtgttgaaacagttgctgagtagtcgcttgcgatcttgttcaacaattctgcttctgaagtgttttgttccaaaacaactttatcatcagctttagcaacagttgtcgatgcttctgaagttgcttcagatccagctgctacagttgattcgctaagagctgctgaaagttctgctgaaccttgttcgcttaatgaagctgagtgagatacagatacgcttgtagatgttgaagcacttgctgatgcagaagcgctagctgattctgtagttgactcagttgttgattctgtagttgattcagattgagattcagttgttgaagttgtaccaagtacagtacttcctcgttctacaagagcttggcttgaaagctcagatgctgttgcaacgtctgaaccattatcatcagctttagcagtattcgctactgtagctgcaccaagaacagcccctgctgccacgatccctttgagcaagcctcggcttgtcatttctgttgctgatacttcatcttcacgaacttcagctactacagtttcttcgacctgaccgcggatgactttcaaaagaccaaagttagaagttgctgcacgcaaccagttcttacccgacttgatcaatttaaaacgagtcacacgatccgtttcacggaattcaccgttcgaacgcttaaaaaacatttctgtctccttattacattttttatttccctaacattatagactaatctgtcgatttttgaaagtaattattcttaattattgctatttttttataatttttgttttagatagtgataaaatcgttttcagtaggatcgatttgtcaagtcggggcaattttttgaaaaaatcctataatactttgactttagaagtaaaacaaaaagccccatttaataggggattttctgataattatctgattttttccaacatactttcaatgtgttggatggatttctcgcgtccaagcaagtagatggtatctggcaattcaggaccatgcatctcacctgaaacggcaatacggattggcataaagagattctttcctttgataccagtttctttttgaaccgctttgatttgtgggaagatattttcagccacaaactcatcgtctgacatggcttcaagttttgccttgaaagcttcaaggacagtcggaacggtttcaccagccatgacttctttctcagcttctgtcaaatctgggaagtctgagaagaagaggtctgtcaatggaacgatttcatccactgacttcatttgtggtttgtaaagttccaccaatttctcagccttgtctgtcaaacgtcctgcttcttcaaggaatggtttggccatttcaaagatagtctcaagatccgcattcttgatatactcattgctcatccagtccattttcttttggtcgaaagctgctggagacttgctgaggcgattttcatcaaagagcttgatgagttcttcgcgagagaagatttcgtcttccccaccagggttccaaccaagaagagcgataaagttaaagactgcttctggaaggtaacctttcttccggtaatcttcgataaattgaagagtgttggtgtcccgtttagacaacttcttaccagtttcagagttgatgatcaaggtcatgtgaccgaactctggagcttcccatccaagagcctcataaaccatgagttgttttggagtgttggcgatgtggtcatctccacggataacgtgagagatttgcatatcgtggtcatcgatcacaacggcaaagttataagttggatagccatctttcttttggatgacccagtcaccaccgatattgccaccttcaaactcgatatcgcctttgaccatgtcatgccatttgtagatacctgactcattgactgccaaacgaaccgttggaatcacacctgctgcttcacgttctgcgatataagctgctttttcttcttcgctcatgccaaggtattcattgatatagcgaggtgtttcacctgctgcttcttggcgttcacgttcagctgccaactcttcttcagtgacgtaagatttgtaagcttttccttccgccaagagttggtcaatgtatttttgatagagttccaagcgttcagactggcgatagttttcatgcgtctcaggactttcatcccagtccatgcccaaccaacgaaggttttcaagctgtgaacgttcgccgtcttcgacgtgacgtttgcggtcagtatcctcgatacggatgataaaggttccaccatggtggcgcgcatacaagtagttaaacaatgctgtacgagcatttccgatgtgtagtagtccggttggacttggtgcataacgcacacgaatatcttttgccatatttctctcctcttatcttgttcgctatttctagctcatttttcaatcgttcctattataccacaaagaaagcaggactgaaatgaataagtgacctttctagcctttcttcctatgtataggaaaaaagccagaacaaatgctctgactgatatctaatctatttgtatcttattaaacgaacacgggctgcggattgtgtcaaaaagatgaatcctcctagaatctctcggattctgcgtcgaattccctattttgactgtatccgctacgccctttgtatcttattttaaacgttcttctaattcaaagtcgattggtagggtttgtaaaaagtgctccaactcacgttcccagtagaaccattcatgcttgcccgggctgtgggtataggtgacatccaaacctaacttttctagttccttgacttcaaaattattggcctcataaaggaaatcctgctccccacaccagatccagagtttggtcttcttatctgaaaacttcttggcagcagtctctagcgaatagggactggtcgtccaatcctcaatctctccaaagatccccttccaaaaagctggttgttccaagtcattgttttcaaagtcccgatcgtggaaactcagagcaccggaaaaactagccgcatgggagaaacgatttgtcttgagagccaagagcatcgatccatagccgcccatggataggccagcaataaaggtcttctcccgtttcttggtcatattagggaagaagcgagaaagagtctctggcaattcctctgcaatggccgtgtagtagttgtagccatactgggtatctgtgtaaaagccattattggtattggggaggaccacgatcagattggtattgcgcaaaatgcgttccacattagtccgcttcaaccaggaatggtggttgccattcatcccgtgtaagagataaaggactgggatatccgtatccgctggatcttccacgcgcgacgcatctggataaagaacagacacaccccactccatcttcaaggcttctgaataatactcaatctgcataactgccatttgatttcctctttctactgttaaaaacactcggcaagcctctggctgccaagcgtttccattttttctattattttacttccatcacgactggtaggatggctggacggcgtttggtttgttcaaataagaacttagacaagttgtcgcgtaccaaaccttttaactcaccccagtcaaagctgtcttgtgccaaatagtcttcaacgctttggttgaccaattcgcaactttcacgaagaatatcccgactcttcttgacatagacaaaaccacgggtgtgcacgcgcgctttggaaataattttcttctctttgcgattcaccgtgagcgccacgataaagatcccgtcttctgacaagaccttacggtcacgaaggacgatattgcccacatcaccaatggcatttccatcgatcatgacatctccagctgagacgctaccagcagggacgaagtcccccttttcgtactccatcacagtcccgcgttttggaataaagatattttcaggcaagataccaacttccatcgctacccgcgcatgggcatccaattcgcggtattccccttggatcgggaagagatatttaggacgaagaaggttgatcatcaactgcaagtcccgtgcgtttccgtgaccagacacgcgcaagcttgacgtgatcaatttgacaatgccacctgcttggtagatcatgttttccacacgagccaccacagcttctttagcaatagatggtgttgtgacgacgtagaccaagtccccatctttgatttccacataacggtgacggccaatagacatcttgcgcaaaccgttgatcggctcacccatccggcctgtttccaaaataatcaattcatgatcctcgaaacggctcatttcttttggcttgatcaagagtttttcgttggcaagagacaatttgttcaagcgaatagctgtccggacgatgttttccacatcaaaccctgtcaagacaactcgacggccagtctcagccgcagcatcaaagacctgctggatccgagaaaggttgctggctaccgctgctacgatgacacgaccatcccagtctgcgatcgtatctaagatggcatcgcctacttcttgctcactggcaacttgaatgttactatccgcattggccgagtcactcaagagagcaagtacgccttcacgtccaatctcagctaggcgagcaaagtctgtcgcgtaggactcgctggcagtttggtcaaatttaaagtctcctgtatagacgatattgccctcaggagtgccaatcacaatcccgatactttcagggatggagtgggttgtttgaaagaaagacacgacggcatcaccaaaatcaatctcagaattttgatcaataacatggaagtcgttgaatttcttcacactgtcattgctttttacaaagagtttagctaactcaatggtcaactctgtcccgaatacagggactttcgcttccgccaaaagataaggcaaggccccaatggcatccgcatgaccgtgggtcaagaaaacacccgcaatgcggtccttgttttcaaatagataatccatgttggggataacgacatccaccccaagttgctcattttctggatacttcaaacctgcatccaagacaaaaattgaatcgttcacttcggcaacgtagagatttttcccattttctcgaacaccgccaagagtgactaatttaatactactcactgttgtctcctttagtgtgattattttaatacttacggtccttggtcgcccaagtcgaattacagctttgcaaatacttgcatatccactctattatacaatttttttctctttttttcaaaaagctttccacagcaaaaaagtcctctcatctatttcagatgagagggcttctaggcgcctatttttagggggaaaagaccctaaagatggtaatctccccgtttattttcaatgatccgcatggctgccttgatcacatgaaacttgcctaataattcctctaggcgcttactatttcgctcgctcaattggccgttctttaccgcttgggacaggcgataaaaatcatccaagtcctccccaatgttttcaaacagctctttggcttccttgagtcggtagcgattgactaggtggttcacatcttttttgaaggaagcgacattgttttcgtgaatgtccgtataggcttcctcttcttccttagattcttggtaattaaccgccttaaagcaagtgatgaactcccgacttttgatattgcaaacaaagatgacgccatcactggctacataggcttctgtgttggcgggttgaaccacattactatcataaggagagagggaggagaggtgttggttgatccacttattcaagtgctgatcatctacgccaaagcgctcaaaagctctttgccgaaaatggtcccgacaactatattcttgcgcatacgacaatcccatactctcacctcctcctgagtattttataaaaatggcctccagtcttacgggactagaggcctggtctgcttcactgacttggtgcaattaaccttttggctaacaaaacaatgtttatgatgttgatttcatttaatagtatttgtgtaaaataccagaggttttctttgctatcccaaatccaaatgattagttttcgactggacgcattgaagtttgaaaacctttacaaaaagcttctacctactatttccacgttttcttatgtctccggacaaactaagcaggtttgcccgaccgtccaaccgatccgacacacacgacatgactgctcttttacgataagagcatgaacagatatcagcaaaacaggcctaaaacgaagtaacctaaattttaactcgataaggcattggtatcaatcccttcttcatctttctaactatattatactcagctacctaagtaattgcaagcgatttcagctgaaactagttccaatttttatgcggttttacagatgatttaagaaaaagaaaagaggctgggacaaaagtcctagcctctcaattatttttggattgtcgagcaagacgcagtggttgagtgggctatactacgctgattgcatcagcttttacagccctactcaactgtgcggaggtgggacgacgaaatcgaattctaacgaattaccgatttctgtcccactctctagcatgcagacaaactacttccacatcaaacaacctaagtgatgtcgcttctgtcctactcccattttacgggctttgtatcttattctttctcaaataattgatagtagtctgcgatggtcatttgggctttctcttcttgattgagatcttggacgatgtgtccgtctttcatgacaatcaagcgatttccatatttcaaagcatcttccatatggtgggtgatcataagagctgtgagggcatcttgtttcacaaactcattggttaaggtcatgagcgcctgactggttttgggatccaaggctgcagtgtgttcatctaaaagtaagagttctggacgtttcagtgtcgccatcaacagactcaaggcttgtcgttgcccccctgatagaaactcaacggctgtatcgatatgattttccaagccattgccaatcttagcaaggactgtttgaaactcttctttatagctggccaagtgacgcggaatcaagccacgtttttctccgcgaaacttcgctaccaagaggttttccgcaaccgtcatgcgaggcgctgtccccattttaggatcttgaaagacccgcgataggtacttggctctcttttcaggagaatagttggttacatcttcccccaaaatataaatcttcccactgctcaccggaagcgtcccagcaatggtattaaagagggttgattttccagctccattgccccccaaaatcgtgataaaatcatgctctcgaatttccaaggagacatcatccagaatgactttttcttcgttcatcccattgctcacggctttggttacattttttaattctacaattgctgtcatttactgagtttcgctcctttcatgatttttcccttaaaggttggaatcatcaggcagatagccaagatcaaggcactgaagattcgaatatagctggtattgatgccaagcgcaatcacggcccaaatcaaaaattggtaggcgatcgatccgatcgcaatactgagcaagcgctctgtcaaggtgacatttgaaaagagcacctctccaataatgagactagcaagcccaataacaatgacaccaatcccacgtgaagcatccgcatagccttcttgctgagccatcagtgcaccagaaagagcaataatcccatttgaaataaccaagcccatcaactccatccgatcagtgttgatcccaaagctcttggccatatctggattgtcccctgtcgcgatataggcttgacccaagcgtgtatccaagaagaagatcaaaccaaggatcacaagcgttacgaaaatcaagccaatcaggatctcattgaacccactggcaaaaggaagaaattcctgaatttttttatagcccagaagtcccaaattagcccgctgcatgacaaatagaatgaccgagttacaagacgtcatcacgaggatccctgacaagagtgtcgggattcttccctttgtgtagagaagacccgtcgcaagtcctgccaagcatcctgctccaatagcagccagcgtcgcaaggagtggattgacccctttggtaatcaaggtcaccgccaccgctcctccaagcgggaaagaaccttctgttgtcatatctggaaaatctagaattcggaacgtcataaagattcctaaccctaaaatggcccaaatcaaaccttgtgaaacaattgaattaatcatagtttctcccttcgataatagtagtttaattgtatcacaaatatggaggagaacctataggaaattcacaatatttcttggatcaccagctttttaaaaataaaacggaaccctcctgattatatggagcaggagggttctataagcttttataattatgcaaaaaagaaacctgtgtttgtttcacaagtctggtcttactagggtaactgacgacaataagggtgtgaagtactaccactccaaaccctactgtatcccaattcaaagtggattcattccccttgttgccggcagtttgaaagatcaaattgctttactagtatactgttttctctacttcaagtcaatggaattttactgaaactagtaaccgaatgaaatgaatatatagaattttactgaaactttttcatcacatttatgcatgtttttctaagtttccaataccaaacaaagaggccttgctctttcgagcaaagcctcttcctgttggatctaaaattgtcacctcatcaacaagtttgtcgatgtcacctcaattttagtcttcgcgttttttgcgttttgcaagtcccgcaaggccaaccataccaagtgcagcacctaacaatgcagcagatgctgattgttcttcaccagtttcaggaagtgctggagctggaggagttgttggtgttggtggtgttggtggcgttggtggtgttggcggtgttgttggtggtgttggtggtgttggtggcgttgtcggcggtgttgtcggtggtgtattcggtggtgttgttggtggtgtatttggcggtgttgttggcggtgttgttggcggaataacagtgttgttaaactctgtatcttctggcaactgagtaatagccgtcaatactttaccgtctttgttaatcataatacccacagtggcaaccatcttatcgtattcgatgctagaatctgtgccacggatttcttctacatggtagagatgagttccttcttcaccacgtttgaattcaagatttgagaaggtgatcttaccagccgcatcattggttacggtttcgatcacatttcctttttcgtccttcagaacgaagctgaattcaccagccttcaatgcacgaccttccaatttcttagtgaattggaattgaaccttaactggaatgttgactacacgtttttcagttggtttttctggtttttctacagtcttcttagttggatcgtattggtgtacgatttgtgaagctgtattttcaatgtccacaccatcttgagcagattgtttaatttctgcaggaatttcaaacttgtagtaacgtccaaaggccaacttagttgtgtcgatcacttgtgtattttctgcgtctccaagtgacttagtcaagtctgctttagatgttgcagtaatcacaccgttttcaaccttgatatcaaacttagctgttacatcttctcctgttacagagtcgtatgccttaatatcagctccgttgacagtcaagttcgcactatcatatttatctgtaacaccaacagattgaatattgtgtgcttcagtgaatttagttgtatccaaccatacttggtagtatactttatcacctttcttgagtgtcttcgtattgatattttgagcttcgttgttatcagtcttatcaacgtaagggttcgcatttgtttccgcaaccttatccttcaactctttatcatcgtcgagaagtttcacacctgtaagatcgaatttagattcgttcaagatgtatttctctggattgaattctggagtttcaggtgggcgaacagtgttattgaattctttgtctgatggatccgttaccttagtaagaagagctttcgcagttccatcatgagaaacttcaactttcacaactgctttcatagtgtcataagtaacggttgtatcagttcctttgacttcttctacagtgtagttgtaagttccttcttgacctttcttgaattcaagagctgagaacttaacgttaccagatgcatcgttcttcacagtttcaagagtcttaccatctttatccttaagaacgaagctgaattcgttagctttaagctcacggccttccaaacgtttcgtgaagttgaattctactgaaacagggatgttcacaacacgtttttcagttggtttgtttggtttcttcactgtcttgcttgttggatcgtattggtgaacgatttgagctgcagtgttttcaatatccgcaccacccttaacagtatctttcactgttgctgggatgtcgaacttgtagtaacgtccaaacgcaaacttagttgtgtcgatcactggagtattttctgcgtctccaagtgacttagtcaagtccgctttagaagttgcagagatcacaccgttttcaaccttgatatcaaatttagcagtcacatcttcgcctgttaaagagtcgtaagctttgatgtttgcaacattgatgtcaagtttgtcttcttcgtagtcatcagtaacaccaacagattgaatattgtgtgcttcagtgaatttagttgtatccaaccatacttggtagtatactttatcacctttcttgagtgtcttcgtattgatgttttgagcttcgttgttggcagtaccatccgcatatgggttggcatttgtgtccgcaactttatgttctaactcgttatcatcatcgagaagtttcacacctgtaagatcgaatttagattcgttcaagatgtatttctctggattgaaatcaggagtttctggaggacgaacagtattattgaattctttatctgctggatccgttacgttagtgatgagagctttcgctgttccgtcatgtttaacttctacagttactactgctttcatcgcatcgtaagtgacagttccgtcagtacctttaacttcttctactgtgtagttgtgaacaccttcttgacctttcttgaactcaagtttagagaacttaacgttaccagccgcatcgttcttaactgtttcaacaactttacctgttgaatctttaagtacgaagctgaactcgttagctttaagctcacggccttccaatttcttagtgaagttgaattctactgatactggtacgctgttgacacgtttttcagttggtttttcaggcttttcaactttcttagtcgttgggttgtagtagttcactacttgagccgcagtattttcgatgtctactccgcctttaacgtcagctttcactgtagctgggatatcaaacttgtagtaacgtccgaattcgaatttagttgtgtcgatcacttgtgtgttttctgcatcgccaagtgacttcgtgaagccatctttaagggttgcagtaatcacaccgttgttcacagtgatatcgaatttagctgttacatccgcaccagtcttaccgtcataagctttgattgctgaaccatcaacatcaactttagcctcatcgtagtcatctgagattcctactgattggatatggtctttgttgtttgcgtcaaatttagttgtatccaaccatacttggtaaacaagtttttgacctggtttaactgattgagtattgatattcgctttttcgttattagatgcatcgtccgcatatgggttcgcattggtatctgcgtacttgtctgccaactctttatcatcatctaataatgaagttccagtcaaatcaaattctttttcgtttagaacatatttttctggattgaattctggagtttcaggaggtgttacacggttgttaaattctttatccgcaatgtcgcctacagttgctacgagaatcttagctgttccatcgtgtttcactgtaactgttacattcgctttcattgtatcgtatgtaacggttgcgtctgttcctttaacttcttctactgtgtagttgtgaacgccttcttgacctttcttgaattcaagagctttgaacttaacgttaccagccgcatcattgcttacagtttcaagagtattcccttctgaatctttaagcacgaagttgaattcgttagccttaagttcacgaccttccaaacgtttagtgaagttgaattccacttcaactggaacgttgttgacacgtttttcagttggtttgcttggtttttcaactttcttagtagttgggttgtagtagttaactacttgagccgcagtattttcgatgtctacaccaccaggtacatcagctttcactgttgttgggatgtcgaacttgtagtaacgtccgaattcgaatttagttgtgtcaatgacttgtgtgttttccgcatcgccaagtgacttagtgaagccatctttaagggttgcagtgatcacaccgttgttcacagtgatatcgaatttatctgttacttctgcgcctgttactgagtcgtaagctttgatcttagtagaatcaagttccaacttcgcttcatcgtagtcatctgagattcctactgattggatgttgtccttgttagctgcatcaaatttagttgtatccaaccatacttggtaaaccaacttgtcgccacgtttcacagtcttggtgttcaagttttctttttcgttgtttgatgcatcgtcagcgtatgggttcgcatttgtatctgcgtacttgtctgccaactctttgtcatcatcaacaagtttatcacctgtgatatcgaatttctcttcagaaacaacatatttctctggttggaacttaggttcttctggaggtgttacacggttgttaaactctttatcagcgattgctcctacagttgcgatcagggctttagctgtaccatcgtgtgatactgtgattgctacagtagctttcattgtatcgtaagcaacagttgcgtctgttcccttcgcttcttctacagtgtagttatgtacgccttcttcgcccttcttgaagctgagtggtgagaatgcaacattaccagccgcatcgttgcttactgtttcgacaactttacctgatgcatctttaagcacgaagctgaattcgttagctttcagttcacgaccttccaagcgtttcgtgaagttgaatcctacttcaactggaacgttgttaacacgtttttcagttggtttgtttggtttttcaacagtcttgcttactgggttgtagtagttaactacttgagccgcagtattttcgatgtctgcaccaccaggaacatcgttcttaacagttgctggaatatcaaacttgtagtaacgtccgaattcgaatttagttgtatcaatgatttgagtgttttccgcatcgccaagtgacttagtgaagccatctttaagagttgcagtcatcacaccgttgttcacagcaatatcgaatttatctgttacatcagctccagttactgaatcgtaagctttgattgctgaaccatcaacatcaaccttagtttcgtcaaagttatctgtaattcctacagtttgaacgttgtctttgttagctgtgtcgaatttagttgtatccaaccatacttggtagtaaatcttttcgccgcgtttaacagtcttcgtattgatgttttctgcttcgttgttgtctgttttgtctacatatggatcagtatttgtttcaccatatttatcagtcaactcagcatcatcatcaagaagcttgttatcagtgatagagaatttcgctgtattcaatacgtatttctctggttggaacttaggttcttctggaggagtcacacggttgttaaattctttatccgcaatgtcgcctacagtcgcgataagtactttagctgtaccatcgtgtttcactgtgactgttacattcgctttcattgtgtcgtatgtaacggttgcgtcagatcctttaacttcttctactgtgtagttgtgtacgccttcttgacccttcttgaattcaagagctttgaacttaacgttaccagaagcatcattgcttacagtttcaagagtatttccttctgaatctttaagcacgaagctgaattcgttggctttaagctcacggccttccaagcgtttagtgaagttgaattccacttcaactggaacgttgtttacacgtttttcagttggtttgcttggtttttcaactttcttagtagttgggttgtagtagtttactacttgagccgcagtgttttcaatatccacaccaccaggtacatcagctttcactgttgttgggatgtcgaacttgtagtagcgtccaaattcaaacttagtcgtatcaatgatttgagtattttctgcatcgccaagtgacttagtgaagccatctttaagggttgcagtgatcacaccgttgttcacagtgatatcgaatttatctgttacttctgcgcctgttactgaatcgtaagctttgatcttagtagaatcaagttccaatttagcttcatcgtagtcatctgagattcctactgattggatgttgtccttgttgtttgcgtcaaacttagttgtatccaaccatacttggtaaaccaacttgtcgccacgtttcacagtcttggtattcaagttttgtttttcgttgtttgatgcatcgtccgcatatgggttcgcatttgtatctgcgtacttgtctgccaactctttatcatcatcaacgagcttgtcacctgtgatatcgaatttctcttctgaaacaacgtatttctctggttggaacttaggttcttctggaggacgaacagtattgttgaactctttatcagcaggatctgtcacgtttgtgatcaaggctttcgctgtaccatcatgacgaacttcaactgtaacgacagctttcattgtatcgtatgtaacggttgcgtctgttcctttaacttcttctactgtgtacttgtaggtaccttcttgacccttcttgtatttaagggcagtgacagtttcaccagctttattagtgtaatctactggagcaaacttgatcttaccagctgcatcgttggttgcagttgcaatcacaacattgtcgctgtctttcaactcgaatgtgaattcgccagctttcagatcacggccttccaatttcttagtgaagttgaattctactgagattggaacactgttgacacgtttttcagttggtttgtttggtttttcaacagtcttgcttactgggttgtagtagttaacaacttgtgctgccttgttttcgatatctgcaccagctacgacatcgtctttcactgttgctgggatatcaaatttatagtagcgtccaaattcaaacttagtcgtatcaatgatttgagtattttcagcatcgccaagtgacttagtgaagccatccttaaggttagctgtcagaacaccattgttatcagagatatcaaatttagtcgtaacatccgcaccagtaactgaatcgtaaaccttgatatctgaagcattaacagtcaatttatccttgtcgtagttatctgtgattcctactgtttggatattgtctttgttgtttgcgtcaaatttagttgtatccaaccatacttggtagtaaagtttttgaccacgttcaactggtttcgtattcaagttttcatcttcgttgttggcagttgtatcgacatatgggtttgtatttgtttcaccatatttatctgtcaattcagaatcgtcatcaacgagcttagtacctgtgatatcgaatttcgctttagaaacaacgtatttctctggttggaacttaggttctgttggtggagtgacacggttgttgaactctttatcagcaggttctgtcacatttgtgatcaaggctttggctgtaccgtcatgagaaacagtaacggttacaactgcagacatttcatcataagtgacagttgagtctgtacccttaacctctgttacagtgtaagtgtaagtaccttcttgacccttctggtatttaagggcagtgacagttttaccagctttgtttgtgtaatcaactggagtgaacttgaagttaccagctgcatcgttggttgcagtcgcaatcacaacattgtcgctgtctttcaactcgaatgtgaattcgttagctttaagagcacgaccttccaatttcttagtgaagttaaattctactgagattggaacattgttgacacgtttttcagttggtttttcaggtttttcaactttcttagtagttgggttgtaatagtttacaacttgagctgcagtattttcgatatctgcaccagctacgacatcgtctttcactgttgttggaatatcgaacttgtagtaacgtccgaattcgaatttagttgtgtcgataacttgtgtgttttctgcatcgccaagtgacttcgtgaagccagctttcaagttagcagtgatcacaccgttgttgacagcgatatcgaatttatctgttacttctgcacctgttacagagtcgtaagctttaatatcagctgcattaagatttaatttagcttcatcatagttatctgaaatacctactgtttggatgttgtccttgttagctgcgtcaaatttagttgtatccaaccatacttggtaaaccaatttagaaccacgttcaacagtcttagtattcaagttttctgcttcattgtttgatgcatcgtccgcatatgggttcgcatttgtatctgcgtacttgtctgccaactctctatcatcgtcaacaagcttgtcaccagtgatatcgtatttctctttagaaacaacatatttctctggttggaacttaggttcttctggaggtgttacacggttgttaaattctttatcagctgcatctgttacgttggcaacgattgctttagctgtaccatcgtgtgaaacaaccactttaacagtagcaaccattgtgtcgtatttgacagttgcatctgtaccaggagtttcttctactgtgtagttgtaagtcttaccaagatcatcacgaccgaattcaagagtcttgaagacaatcttaccagcagcgtcattcttcacgcgttcaacttcaacgccgtctttcttcaatacgaattcgaattccttggcttgaagttcacgaccttccaaacgtttcgtgaagttcatttccactggaactggaacgctgttgacacgtttttgtgttggtttttcaggtttttcaactgtcttgcttactgggttgtaaacgtgaactgtttggttggctgtattttcaatatcagcaccagctttaacagattctttcacagttgctggaatatcaaatttatagtaacgtccaaattcgaacttagttgtatcgataacaggagcgtttactttatctttgataaattcatctttagaagttgcagtgatggtgccgttttcaactttgatgtcgaatttattggttacttctgcaccagttactgaatcgtatgctttgatgtcagctgcattgacgtccaatttatcagcgtcgtatgtatcagatacaccaacgtattggatgttgttcgcttcagtaaatttagtcgtatcaagccatacttggtaaaccaatttagaaccacgtttaactgtcttagtattcaagttttctggttcgttgttggttgtcttgtctacatatggatctgcatttgtttcagtgtattcatttgtcaactcatcgtcgtcatccatcaacttgttaccagtgatgtcatatttctctttagaaacgacaaatttttctggttggaattttggagtttctggaggagtaactttgttgttgaattccttatctggagtaccatcagtagcgttaccattggcatctttaccacctgttgatgtcacgtttgtaacagttgtcaatgaatgaccgtttttggcaacttcaacagtcactgtagccttcatttggtcgtaagtcattccaaattctttgtttgccggaatcacttcttctacagtatatgtgtgggtaccaactttcgtattgtcgaatgacaattctgagaaggttacgttaccgtcagcatcatttttcactgtttcaactttgttaccagcagcatctttcaatacgaagctgaattcgcctgcagccaatttacggccagccaacttcttagtgaagtcaaatttcgttacaactggagaaaccacatagttgttaaactcagtgtcttctggcattgtaacagctgcgctcaagatacctgtagctgcatttttggttacattaacagttacgactgcattcattgaatcgtagtcgatgtttgtatctgcgccagctacttcacgtacagtgtaagtgtgttcacctacagcgttgtattcaatcgcatcaaatgtgatagatccatctgctgcatttttcttggtttggatcacattgccattttcaagcaattcgaatgtgaaggcatcctttgtaagctctttcccttcaagacgtttagtgaacttgaattgagcttgagttgcagcaggtgtgaaggtattgttgaactctgtatctgcaggaagagcatttgttgctttaagaacgtgaccttctttcgtaacagtaattgttacttcagctttcattgggtcgtaagtcattcctgcttcagaaccttggacttcttctacagtatacttgtgaacacctacttgtgtattgtcaaaggtcaaattatcaaaggctacaacaccttgtttagtattggtcttggtttgaagagtcttaccatttgcatctttcaatacaaatgtaaattcgccttctttcaactcacggcctgcaagggctttgctgaagtcgaaacgagtcttaactggagctactgcaaagttgttaaactctgtatctgccggcatagtaactgcagcgttcaaaagaccagtttgagcgtcttttgtgacgttaacagtcacaacagcgttcattggatcataatcgatattcgtatctgttccagctttttcacgtacagtgtaagtatgtgtacctgcagcagcgtacgagattgcatcgaattggatggttccatccgctgcattttgtttagtttggatgacgttaccattttcaagcaattcaaatgtgaaggcatccttagtaagctctttcccttccaatttcttagtgaacttgaattgagcttgtgtagcaacaggtgtgaaggtattgttgaactctctatctgcaggaagtgtatttgtcgctttaagaacgtgcccttccttagtaacagtaattgttacttcagctttcattgggtcataagtcattcctgcttcagaaccttgaacttcttctacagtatacttgtgcgtaccaacttgtgtattgtcaaaagttaaatcatcaaaggctacaacaccttgtttagtattggtcttggtttgaagagtcttaccagttgaatctttcaatacaaagctaaattcgccttctttcaactcacgacctgcaagagccttgctgaagtcaaaacgagtcttaactggagctacaacgtagttgttgaagattttatcatctgcacttgatttgaatccaccttcaccagtgtacttaactgaagcttgcaaatcaccattagcgtctttcgtaacctttacagtcatggttacttccatagcatcatagtcgacatccttatctgcaccttttacttcagtgatggtatatgtataagtaccttcttttttaaatgacaattctgagaagcttgccttaccatttttatttgtgacagtttcttccacaccaggcgaagatgagttttccttaatcttgaagctgaactcaccatcaacaagcacacgtccctcaagttgtttttcaacttctggttttaccttgatggtttctgtcttgtcatagtagtagattggttgtttgtatggtgtcaaggagttgagcaagtcaacgttggtaccaatacctcctactccacgttccaattgtgaatttggtgaaaggtgaccgatattgtctcccaagaaaggaacaaagactgtcttatacggagtgtagccagcagcccattggaaatcgaacggaactgtcttaccgtttggatagttcgtttttgcaccagtttttggatcagttaccgtatgcgcaatcgttgtaagcggtgtctttttgactactagttcttcagtattagcttctcccggcttgattggtttggtctccgctaaaagcatataaccgtcagtgttcaaagtaccatccgaacgtttgctttgttgtttgggatctagtaggtaaacacgaaccactacagatccatcttcacccacaatttctttgatacgcttaattcctgcacgctcagcatccatgaatttggtaccaacggtgtaaggacggcttacataaccagaagttgtatctggatctaccgtttgataaagtttataaactgtctctttagtaataccatttccaagatcttcagtttgcttggtaaattggcgttctccagaagctgtgaatttttgcccttccatagcttttagagtatatttagctaactcagtttcattgccattttctttatagtcctgagttgtaacagacttaccagtttccttgtaggtagggtttttcttgtcaacaagtttatagtaagtggtcttttcaacattggcagggatcttaaagtttgtatctgtaacttgacgaccattatatgtaggttcaactgcatttaagatatcatttgaattacgtgcgtcataaacagcatcaaagcgggcttgttcagctggagtcaggttatgaccagcagctaccaaagcttgaatcgctggaccaacttcaaatcccatttgaatgaatggttggtctgttttaccaggaccttgaccagcccctgcttggtaatccacttgcagtgtcaactcattattagattttggagtggttgtagtgaatttttgaacaccactagttgcagtgactgtatgtgtttcaacaacagcacctgtattcttatcgatcagttcaactgtagtatctgtcgaactatcaaagtttttataagcacgtgcatagtagtttgtgttgtaacgggcattaaattttgtcaaattccagataccaaaagtatagaaatctccttctttagcttggtaaccagctggaattgtttgagagtgcacagatgctccgttaggatctgtcatgtcagggttagcagaaacattcgaagcaatggtcgttacaacatcaatcggtgtcacattatggtctgtcaaagcacgtttaccacgacgacggctacttacagctaaagctcctgcatttgtacgttcttcattagcatttgccacagccacagcagcatttgtacttgctactctatctgattgcgcagctgcttctgtaccagtgatcggagctgctgaacttacagtagctgaaaaagtagtcgttcctgctggtgtagctgcttcttctcttgcagctgctctttctgagctttcacctgctgcagcagaagttgcagtaggttgagctgtggtagccgctgttgtagaagctggtttagagcttgactcttttttcttctctacaggtttgctggtttctgatgacgctgtcgtttttggagcttcttcagattttttagtttcagctttagctggttttgcagcttcttcagctttcgcttccttgttttctgtagcagctggtgtttcagctacttcagctttttcagttgctggagctggtgtttctgaatttgcagcagcagtcccagaacggtcaatttttggaactgatgctccttccccgtatgccttagaagcaccaggtgcttctgtttgacttgattctgttgcagcaggttgcgtttctgaagttgctgtttctgcaggtccagaggctgcttttgcttcatccgctgacgcagattgagcacctgcagcaaagagcgctgttcctaagagaacagaacaaaccccaatgctatattttcgtaaagaaaagcgttggcgtctattgaaaatatccttcatttataggatctcctttttcatatttcatgattccatgatacaaataaaattgtaacattcttgacatcaagagtcaatctgttgaaatttaattgtaatattcttgttaaaatgttatattataccacatattttttaatattttgtgccaaattgtcacattttttcctatttggttcaatttttttacgccaataaaaaagagttcaagaaaacaaagtcgttttgttttcttgaactcttctattttatttcacttcggagatcaatccggtatccacatcatacacagcccccgaaataacgacatcctctggaatcaaaggagacgcctttaaaagctccatatcttcacggacgctttcttcaatatcttgaaaggggaggaaatcacgctctcccacatccacacccagttctttcttgagatgctgacggaaaccctcgttttcaaaggtctgtgcgccacagtctgtatggtgcaaaaccacaatttcacgggttcccatttgctgctgggaaatgaccaaggagcgaatcatatcatcggtcacgcgccctccagcattccgcaaaatatgagcatctccaagagccagacctagtgccggcgccacgtgaagacgggaatccatacaggtcacaatggctacttgtgttttgggcttaatcggaagacggaggtctccatgtagcgccacataagcttggttagctgttaaaaaattatcaaaataagacatggtctctcctttattcctttgaaattcaaatcatctattattttaccatatccgatcctttctgtcaggggatacctcctgtcatctgtcacatctgaaaaaagggagtgggaaagaactcaaactaattacgttgaaaaggttccccgaaccttttcaatcttcccacctcgcacggcttcaacagtctggaagactgttgaaggttgcagataaagaaaactttgtttccctcattaggtcgtctttggagattgaaaagcgaacaatacttaggaaacttgcttcgcaagtcctatccgccacctcaaagcagtgctttgagcaatcaaccactgcgtcatgctgttattcctatcaaacatcaaagactggacagtttttgtccagcctcttttctactattaaaatactttcttcaagacttcagacagtgtactcacaccgaccacttcgatccctgatggtgtcgaaatccccgtcagagaatttttcggaacataaatcttggtaaaaccaagtttagcagcttcattgatccgttgctcgatccggttgacccggcggacttctccagtcaagcccaactctccaacgaaacactcttgcgggttggttggcttgtccttgtagctggaggcaatggctacggccacggctaggtcgatagctggctcatccaatttgacgccacctgcagacttaagataggcatcctgattttggagcaagaggcctgcgcgtttttctaacaccgccatgatgagactggcccgattgaaatcaagccctgtcgtcgtccgcttggcatttccaaacatagttggcgtcaccaaggcctgcacttcggctagaatcggacgtgttccctccatagtaactacgatagaggatccagtcgcgccatctaaacgctcttctagaaagacctgactaggattaaggacctcgaccaggccacctgattgcatctcgaagatcccaatctcattggtcgagccaaagcggtttttgacggctctcaggattcggaaggtatggtggcgttcgccttcaaagtagagcaccgtatccaccatatgctccagcatcctaggccctgccaaggtcccttctttggtcacatgaccgacaataaagatggcaatgttattagtcttagccagttgcatgagctcagctgttacctctcgcacctgagagactgacccctgcacccctgaaatttcaggagacatgatggtctggattgagtcaataatgaggaaatctggctggatgcgctctacttctgctcgcacgctctgcatattggtctcagcataaagataaaactcactgtcgatatcccccaagcgctctgctcggagtttaatctgctgggccgactcctctccactgacatagaggaccgttcccacttgagacagttgtgtggagacttgaaggagcagggtcgatttcccaatccctggatcccccccgatgagaacgagactccctgggaccactcctccaccgagtacacggttgaattcctccatctccgtcttggtccggtgaacattgatagaggtcacgtccgccaatttcatgggtttggtcttttcacccgtcaaggatacccgtgaattcttgacctctgcgacctcgacctcttcgacaaaggaggaccaagaaccacagttaggacagcgccctaggtatttgggtgaattataggcacaattttgacacacaaatgtcgtttttttcttagctatgataattctccttctactgcaactcctgtagagcgccacttatacaatgtattttgaaatctcttctggttggcaactccgacagcagacaaatcgacagaaacctgataattctccttgacagctgccaaaacggaagccttgacacagccattgccatctacccctataaactctatgcttttagcaccgtttccctctaaaaaatcttttaaatctggattagtaaagcaagaagcccgacgcttttcaaaaatacgagaagatacaaccagcaagtcggtcgcaaatttcttctttctatcttttctctcccagaaaaaacggttgagaatatagataactcggtcgctaggataggtagcaattttgtcatttacagctgcagtcagtttttcatgatatgcttttcctacagcaacgtaatctgactgcatgtctacaactaataaatagtctgccattttattcctttatttccccgtacttccaaatccaccagtccgcacgccgtctgcctcatctccatctgcaattaagaaaggagcaaagacagcctgaaccacgcgttcgccaacttcaagaacgacttcttggtccgtaatatttttcatctgagcaaagatatggccttcatttcctggattgccgtagtagtctccatcgataacccccacagagttgatcaagactaggccttttttgcgagggttggacgagcgatcgtaaagataaagtacctcacccgcttgcatataggccttgaccccagttgggacgaggacgatttctcctggtgcaatgaccgtgcgctcggccacctttaagtcgtaaccagctgcgtgtgctgtctcccgctttggcagtaagtcctgattggtatagcttgatacaagttcaaatccacgaatttttgtcatcataattcctctttcattctaaatagtttccatctcttctattataccatcactttgccctagcgtctcttcaattctactattcgtattttttgagtaaaaacctcctttttcaccttcattatttgtaaattatatgatgatttcatggttgttttctaaaagaaagtgaaaattaatgaaacagcttaaaaacacctaatttcaccgattttagcttgaagccaattattatttttgctataattccctgtgtagggaataattttaaaagtaaaatattttaccctataaaattatttaatggaggtcgtgtctcagcactcgattctaattaccaacagataggatttgaaagatccatatcgttaaaagtaatcaggtattgatgattaggcactaatttttttatgaaaagggaagataagatgaagaataggaatatcaaaattttctcatttgtcctttgtttagtggccatgcttttcgctttaggtctgaatcgcacttcagcagaaactcctggagtgacagtaagcggaaaatgggtcgatacaatttcaaacatacaagtttccaataatgaaggcggcaaccttgattgggaattaggacaatgggcaacgttccgtattaatgcaacatatgatttagaaggtaaaaatgttaaagcaggtgaccaaactacagttaccgtaccagatgcattaattatcacatccgatagttttgaaattcgcgatattaacacaaatgaaattatcgctcatgctactgttgatgctgaaaataaaaaattaacattaacgtatacagactatgttgaaaaacattccgatacaaatggatcgttcttcttctatgcccgtatcgacttcaaaaagcaccctcaacaaggagaaattccggttgaagtgacggttaacaacaaaacaattattgcaggtaaagttacctttaaaggggttggtgatggtgatccaaaccttttaaagaaaacaagttgggttcacaaagatgaccctaagactatttcctataccatttctgtgaaccaactaaagcaaaatattaaagaggttacagtagaagacacattgcaatttaccaatgcttcttatgttaaagatagttttcgtgtgacaaaaggtgagatgtcttatgtcgatggtggatggcaatttaataatactaaggatgtaaccaatgaacatcctgtaactgttggtgaaaatggtcaatcatttgttgtgaatcttggagatattagtgagacggatcaataccgtattacgtatgatgttcatttaaattactcaccagtcgatggggaaatcttaaataaccaggctactttaaaaggtaagaacatcgatactaaagaagcagtaaataaagctgccgttcaaattgctggtggttctggtgttggttatgtctttaccattcatattcacaaagtagatgatgctaaccaaccacttgctggagctaaattcaaagtggtacgtcaggccaacaaccaagtaatcggggaatatgtaacagatgataaaggtaacattacagtcaatggtcttttaaaagataaatacatcttaactgagttacaagcacctgaaggttataccattactactgctgataccccagttaatgctgaagactttagtggaactgataaatcagtgacgaagacaatcgtcaatccaaaagcaaaacctaaagcaactcaagctaccatcgaattagataaaactcttacaggacgtgatctaacagatggtgaatttagctttgaattgtacgagggtgctaacaagcttcaaactgttacaaacaaaaacggaaaagtaacatttgcaccaattgagtacaccgaagaaggtgaacacacttacactgttaaggaagtagctggaaataccccaggtattacctatgacaagactgataaacaagtaactgttaaggtgaaaaaagatggcgacaacctgaaagcagatgtggcttatccagataataaaaccttctcaaatacttatacggctcctcaaccagcaaaagctaaaatttcagctagcaagattttagaaggtgctgaattgaagaatggcgaattcaatttccaattgttggatgaaaccggaaaagttcttcaaacaaaacaaaatgctgcagatggtacggtaacctttgatgacatttcatattcatcagaggacgcaggaaaaaccttccactacacgattaaagaagttattcctgaaagcaaagcaaaaggaatgacctacgatgaaggaagtattgatgctactgtaactgtcacaaaagatgatgcaagcaatacactcaaagcttctgtggcatatggtgataagaaatcattcactaacaaattggtaacaacttcaattccaccaactccaccgactgttgacaaacctgaattgaaactgtacaacattcaattgcacaaagctaacgctgacggaaatgctcttgcaggtgctgtatttggtctctttgaagccgatggtgtgaccccagttgccaacccatatggagaaggtcaagcgacagcaacctcagatgccaatggtcttgtaagctttgtaggctttgaggctaaggattatgttattaaagaattgactgctccggcaggataccaactttcaaacgtttcaatcactgtttctgcggcagagttaactgctgcgacagatttggtagttgataagggtaatgtggtgaataaaccatttactgctattccaccaacaccaccagttgttgaaaaacctgagttgaaactttacaatattcaattgcataaggtgaatctagtcggtcaagaccttgcaggagctgtctttggactctttgaagcagatggtgtgaccccagttgccaacccatatggagaaggtcaagcgacagcaacctcagatgccaatggtcttgtaagctttgtaggctttgaggctaaggattatgttattaaggagttgacagcgccagctggataccaactatcaacggatgttattactgtatctgctagcgaattaaaggctgcacctaaccttgtagtagataaggggacagtcgtaaactacctaactccaccaaacacaccgccaactacaccgccaactacaccaccaactacaccaccaactacaccaccaactacaccgccaactacaccaccaactacaccaccaactacgcctccaactaccccatcaacagacaaaccaaaaggtgataagccttctggaagtcaaccaaaagaagataagaaacatactcttccttctacaggtgaaacagtgagcgagggactagtggctgcaggacttgctttggcagtagctggaagtgccttagtttacaaaaaacgtgaaaattaatttctaaaacaggttttgttctagccctgctagacaaacctgtttttttcgctataaatattttttatctttatctatcgcctattgtgaatcaggaaatatcctatctcattctttcatacatacattgggaaaactccctatctttagtcttttacctgttagcacaaacgataagagtcaggaaaacatggagtaaaatatcctatgtgcactaaaaaagaggttgacccaacttcaacctctttttttataattcctgtaataagtatttaaaaagttctaaattccctttttcttcattaaccaagtattctgggtgccactgcaagcccataatgcgatgaccatctacagcttcaatggcttcgatggtgtgatcgcgcggatcaaaggcggttgcacggaaattcggtgcgagatccttgatgctttgacggtgcacggaattaatccgactggcctgtccaaaaagctgttctaccacactgccttttttagtctggatagaatgggaagtcccaaacggaagtccttgccaatgcccttcgatctcttggttgagtgttcctccaaaagccacattgatcaactgaaccccacggcaaattcctagaaccggtttgttttggcgtactgcttccttcagtagggcaagctcaaattgatcgcgtttgatgttgtaatcgtcgctctcgatagttttttcttcaccataaagactcggctccacattttggcccccactcaagatcaatttatcaatggtttcaacataatccttgactaaggaaatatctcccatcggaataaccattggaagtccgcctgcttgacgaatcccttctgcaaactggctggaaacggaggaatgaaggttcttcccttccggatcaaccggacagagattagcggatactcctactatggttctgcacatattcattcctcctttattatttcatacattcatcttatcacctattaatgatcgtgtctaatatgtatttttaaaggagatgataaataatatttatcgcgtaaaaaaacaggtttgtctagcagggctagaacaaaacctgttttagaaattaattttcacgttttttgtaaactaaggcacttccagctactgccaaagcaagtcctgcagccactagtccctcgctcactgtttcacctgtagaaggaagagtatgtttcttatcttcttttggttgacttccagaaggcttatcaccttttggtttgtctgttgatggggtagttggaggcgtagttggtggtgtagttggtggtgtagttggcggtgtagttggtggtgtagttggtggtgtagttggtggtgtagttggtggtgtagttggcggtgtagttggcggtgtgtttggtggagttaggtagtttacgactgtccccttatctactacaaggttaggtgcagcctttaattcgctagcagatacagtaataacatccgttgatagttggtatccagctggcgctgtcaactccttaataacataatccttagcctcaaagcctacaaagcttacaagaccattggcatctgaggttgctgtcgcttgaccttctccatatgggttggcaactggggtcacaccatctgcttcaaagagtccaaagacagctcctgcaaggtcttgaccgactagattcaccttatgcaattgaatattgtaaagtttcaactcaggtttttcaacaactggtggtgttggtggaatagcagtaaatggtttattcaccacattacccttatcaactaccaaatctgtcgcagcagttaactctgccgcagaaacagtgattgaaacgtttgaaagttggtatcctgccggagcagtcaattctttaataacataatccttagcctcaaagcctacaaagcttacaagaccattggcatctgaggttgctgtcgcttgaccttctccatatgggttggcaactggggtcacaccatcggcttcaaagagaccaaatacagcacctgcaagagcatttccatctgcgttagctttgtgcaattgaatgttgtacagtttcaattcaggtttgtcaacagtcggtggagttggtggaattgaagttgttaccaatttgttagtgaatgatttcttatcaccatatgccacagaagctttgagtgtattgcttgcatcatcttttgtgacagttacagtagcatcaatacttccttcatcgtaggtcattccttttgctttgctttcaggaataacttctttaatcgtgtagtggaaggtttttcctgcgtcctctgatgaatatgaaatgtcatcaaaggttaccgtaccatctgcagcattttgttttgtttgaagaacttttccggtttcatccaacaattggaaattgaattcaccattcttcaattcagcaccttctaaaatcttgctagctgaaattttagcttttgctggttgaggagccgtataagtatttgagaaggttttattatctggataagccacatctgctttcaggttgtcgccatcttttttcaccttaacagttacttgtttatcagtcttgtcataggtaatacctggggtatttccagctacttccttaacagtgtaagtgtgttcaccttcttcggtgtactcaattggtgcaaatgttacttttccgtttttgtttgtaacagtttgaagcttgttagcaccctcgtacaattcaaagctgaattcaccgtcttttagatcacgacctgtcaactcttttgtcaactcaattgttgcagttgttgcgtttggtgtgaaggcattggtaaatattttgctttctggatagacgacttctgcctgcaaggcatctccatcacgagtgactttaacagtcacttgtttttcagatgcatcgtaagcaatcgtagcattatcccctttgacctctttcacagtataagtatgttcaccttctgctgtgtaagaaatagcatcaaaggttactttgccagatttgttggtaacagtttgaagtttgtttgtaccttcgtacaattcaaaactaaactcaccgtctaccaagtcacggcctgtcaactcttttgtcaactcaattgttgcatttgccgcctttggtgtgaaggcattggtaaatattttgctttctggatagacgacttctgccttcaaagctcctccatcacgaatgactttaacagtcacttgtttttcagaagcatcgtaagcaatagtggcattgtcgcccttcacttccttcacagtgtatgtgtgttcaccttcttcagtgtactcaatcggtgcaaatgtaattttcccgttttggttagtagttgtttgaagtttgtttgaaccttcgtacaattcaaagctaaactcgccgtctaccaagtcacgacctgtaagaactttatccagctcaataacagcttgggttttggccggcttctctttcttgtttacaatggttttgctaacaggtttcgttggtgtcgtaaattcactagcttcaacaattgtatcttctgccaagtcataccctttcggagcttgaatttctttgatgatgtatttatctctcaagagttctttaaggctaaattcacctttagcatctgattcaaactcacctaatacttggccagttgcttgacggataacttggaatttcgcacctttcagcggttcattactttcgtcaactttatgaacttgaatgccgaaggcataaccaacaccttcaccacccgcgatttggatatttactttactatttgaatcgtatggttttttattatcacctacgatagtcgccttatttttgatcacctcacggtcaaccgcatcatagttaacaactgcttcatattcaactgcaaagtgatcgttagcagaaatgttccctagattaatcgtaaatgtagtatctgttgcatttacagtgtattgagaggtgacatctgttttgtttttaagttgccatgttccagtgctgtaatcccaagtacctttgtagatcttaaagctaccagccttgtaggttacacctggtgattccatagaatctgaaagaactgcattgctgattgcctcgttggtcctatttacagaaatacgaaaacctaggctcttgtgatctccattatcccaaccagatttgataatagtataccgtttaccttctccgacagtcccactttttactgtaccatcgaatttcactttgttattaacagagaccttaactggcgcattaccatcatttggaaacttatctttattaacaccagcatagaagaagaacgaacctgaaatatcatttttctcttcaacaaactttgtgaatgtcaagacaattttaccagtagttgcatcaacctttgcgttagcgatcaatttaccagtaatggagtcattaatttcaaaatcctgcgatttgatgtcaattggagaagcaataactacttccgtcgtatctcctgctttaacgttttttccttccaaagcaaactttgcattaagacggaaagtatcgtatcttccaagcggagctgttaaatccccgccatcattgttttgaacttttacatttgtgatgacatccactttttttgacgtttctgcatttacaattttagaaaaaagcgtaaagcataccatcaataatgaaagcatcatcaatagatatatagccaattttttcattttatctccccttatattcataataataggcaaaaaatattatatcacaaattagtagtaatacaagtaaaaggtggcatttttttatttagcatcttgtcaaaatgaaatgtcctcacaaaacaattgatgatcatacaagtttttttacctatattatgttaaaatagagaggaaaatagaatcgtccttcaaggcacacattcggccgtttcgaaggtgcaagcgctagatttcctagccttgttgaaaaaatagacatagaaatggaagatacaatggaaaaacaaaccgttgcagtattgggtcctggttcatggggaacagccctttcacaagtcctcaatgataacggccatgaagtccgtctctggggaaatatccaagaacaaatcgatgaaatcaataccgctcataccaatcaacgctatttcaaagacatcgttattagcgaagagattactgctacgaccgatctgaaagcagctttggacggcgtggatgctatcctttttgtcgttcctacaaaggtgacccgcttggtcgctaaacaagtcgctgaaacactggatcaccctgtcacagtcatgcacgcttctaaagggctcgaacctggtacacacgatcggatttctcaaatccttgaagaagaaatccctgcttctcttcgcagtgaagtagtggtcgtttctggaccgagtcatgcagaggagaccatcgtacgggacatcaccctcattacagcagcttcaaaagatttagaagctgcacgctatgttcaagaactctttagcaatcactacttccgtctctataccaatacagatgttatcggagtggaaactgctggagccttgaagaatatcatcgcagtcggagctggagccctgcacggtcttggttatggggacaatgccaaagcagccatcatcacgcgcggtctcgctgaaatcacgcgccttggcgttaagctcggagctagcccattgacctatagcggtttgtctggggttggtgatctgatcgttaccggaacttctgtccattcccgcaactggcgagctggggatgctctcggacgtggcgaaaaattggaagatatcgaagccaacatgggtatgatcattgaagggatctctacgaccaaagtcgcccacgagctggcccaagaattggatgtctacatgccgattacacaagccatttaccaagtcatctatgaaggaaaagatatccgcgaagccatccaccacatgatgagcaatgaatttaaagaagaaaatgagtggaaataagtcaaccaccctaacatcaatcctaccttttagaaaggaaactatatgactaaagttagaaaagcagtcattcctgcggctggtttggggacacgcttcctcccagctaccaaagctttggcaaaggaaatgttgccaatcgttgacaaacctacgatccaatttatcgtagaagaggctctgaaatctgggattgaggaaatccttgtcgtaacagggaaggccaaacgttcgatcgaagaccatttcgattctaacttcgaattggaatacaatctcgagcaaaaaggcaagactgacttactcaagttggtcaatgatacaacagcgatcaatcttcatttcatccgccaaagtcaccctcgaggtttaggggacgctgttcttcaagccaaagcctttgttggaaacgagccttttgtcgttatgttgggagatgatctcatggacatcactaatgatgatgccttgccattgaccaaacaattgatgaacgactacgatgaaacccatgcgtcaaccatcgctgtgatggaagtccctcacgaagaggtttcttcttacggtgtgatcgcacctcaaggagaaggtattaacggtctttatagcgttgaaacttttgtcgaaaaaccaaacccagaggatgctccaagtgatctcgccattatcggacgctacctcttgactcctgaaatctttgatattcttgcaaatcaagaaccaggtgctggcaatgaaattcaattgacggatgcgatcgacaccctcaataagacccaacgagtctttgcccgtgaatttaaaggccaacgctacgatgtaggtgataaattcggcttcatgaaaacttcgatcgactatgccttgaaacaccctcaagtcaaagatgatcttaaacaatatattattgaccttggaaaaaaattagaagcaactgaacaaactgcagactaatcattttcaaatctacagaatacaaaagagactggccatatcatgtaagagctttgctgccctacaatggtcagtctttttttataaaaaagaggctggataaaaatccggcctctttcgtttcattggacttggtccaatttactttttattcttattgtttaaggatgaacattgtaagaataatttgtatttgggaaagtttcaatttcgcctggattaaagttagaaccgaagcgattattgttgtttacactgtttcctactacaggagcttcaaccggagattgaactttttcttctggcttcacaggcgtttctactttcgaagatacagcaggttgtttatccttgttagcagcatagccaaagcgattatttggatttccttctgcatttgctggaatgtctttattagaaggtgttgctacataatctggagccggaattttaattttgttcacatcttcattgatttgtggtttttctggaacttttggtgtatctggtttcttaggttcttcaggatctttataattatctggttgagaagcacgatatggatcagatttacgtccagctgcctctaattgtttttccattaatttttcataatctttgaagtgttggaaaagacgatcagacaattccagtgcatcttttgtcaccttatcttcggcagcttttgcagcttccggttgatctttcaacgcataatattcaatatctttcttttcttgatcaacaataaattgtttttcaagagctttccagtgatcttggaccgattttccaaagacatcttggttattgatcgccatgttgtcaatgtgccatactgtccaataccatgaatttggatcataagttgctgtttgaggtttgaaggctttgtaagtatcttttagattaccatagaatggaacataaggagtgttccgagatggtcccataccaagccataacgtaccaccaaatgattttggaaggtttggattgatttggtaaacatgggcatcgatgacgttttcatttcctaaagcatacttgtattggtctttacggacagcatcgttgctaccattatcaccttgtttcttcactccaatttgatcgtccggtacgaagcgaccatttaagtgttcaaagcgattccgttgcatagcaaaggcatcttctaaagtaaatttcttatttggatcagttggtgagcggaaaagttcatattcatcatcttcataagtcacttttgattttggatccaaaagagtgatccctgcataagtccgagaacggtccccttctgcatatttttctggtccataagatttagcgatatggaaattgccatctttatcagtcttgtaactacctgattctttagctactttttcaacatcttttgaagcaataacattttcagtgtcattcaagtttacatggccaaggtagtaggtattggcaaaaactgcatatttatcttctggaactttaacagctacatattggtgtccagaaagaatttccatgtaccaagtttctttctggtcggcaataacaactgtattcccctcagctgaacctttttcttcaatgactttcgcaagtaattcgattccttcgcgagcagattttgcacgaggtaaaattacatcaagcatggcagcttctggaattcccttttctgtcaatgggtcagtcttcaagacttttttgtttggaatggctgtaacagttgaggtcatagaaacgccggcttcgttaaatccatgttcaccaaaagcaccgttactaccatctccacgagcagagtcataagtcgctgtgtatttcatttcactagcagcatgtggataggtaaaaccattagattcgtcttccagttgatccccttccttatagttcttcgcatcaacaactacaaagtttttgttgtgctttccaccatttggatagtaagggtagtcttctgtccgaccaaagagagtggtcccatccttggtcaattggcgaccaatgataaaaccgcaacaggcttgaacagcttgaattggtaggagtaaaagtgtcatcgctaccaatgagagttttaacaaccattttttcatggcaaatctcctttgtttttgcactacttttgacaaaatagcactatttttggtttttatatctccagtttacacctttctcaacccttttgcaagcgctttctattttgcatttttatacttttttacccatgattaccttctctatggacctagcaatagaaggctcatttagcctctacaaatatattataataaatatatacaatcctttgcatttcaaacaattttctgttagtttacgattttgctacattttttaggaaaaaaagagagtgggacagaaatcggtaattcgttagaattcgatttcgtcgtcccacctccgcacagttgagtaaggctgtaaaagctgatgaaatcagcgtagtagagcccactcaaccactgcgtcttgctcgacaatccaaaaacaattaagaggctaggacttttgtcctagcctcttcttaaaatagattcaagattttacctaagaaataaagcaaaagcaagagataagagagggctgcactcatctgataggttcggttcataaaacgagcttcccctcttactggaaagacataagccaacatgaccccagctactaagccaccgatgtgccccgccatactgattcctggcatgaagctaaagatcaaattgaccacaatcaagctggtataggactgactcaagtggcgaatatagggactttggacaataaagcgcagcgcaccaatggtcccaaacagtccaaagagggctgtagaagctcctgctgcaatcacatctggcgtaaaaatagcaacaaagacattacccatcatgcctgataagagataaagagctaagaaagccttcgatccaaagagatcttctgccaaacgtcctaagtaatagagggtgatcatattgagcacaaaatgttctaggccgatatgaacaaatgtagctgtcactattcgccataactggctaggatcgactttcacaacctctccaataataccaccgctatagtaaatagcagcacctgtttggtagtcgcctccaaatcggataaacatggaaagaaagactgccgttgtgacgagcaacaagaggctggtcacaggataacgacgatcaaagagtaacttcatagactagcacctcctgaactgcctgatcaaacgtatctggctggaaatccttctgctggatggaataaatcgtactaaccgtttttccagtaaaatctgctaaataacgatcataatagccaccaccatagccaattcggtagccttttgactggaagaccacgcctggtacatggatcagatcaatctctgactgttccacaagctttcctttttcattgggctccagcaaaccaaagcgtgtcttttccaaaatattaggatcgtattccacaaattccattcgcccttgtggataggtacggggaacacagacgcgttttccaagttgaagagctgcttggatcaagctagctgtggaaacttcatggtcaaaagacagataggtcgcaagggtctttgcctcctgaaaagctggcagctccaagaggcgctgagtcagctcttcatctgcttgagttttcacggattctggcaactgtttcatggctgcaatggtttcttttcgtagtgttttcttcattccctactccttttgtctagctttaattgtatcattttttaggaaagatccgaacagtttttatacaacaaaataaaaatccaactccagacggagttgaatcattcctttattggttagctttcattttcaaaaatttaccaatgttttccacagcaaagggaagggctgcttcatttgggctcatctttggatggtgcaaggcataaggggtatcaattcccagccagaacatgacaccagggaccttgctcaagagaaagccgaagtcttctcctgtcatcgcaggcagaatatcaatcaggttcacgtcttcctcagctgtgaaaaagtccatgagttctttggccaattctggttggttttccacaggcaggtagcccccttgcttaagttccaggtccaatttcacatcaaaggctgctgcaactccttctgcaatggttttgacccgtttttgagtcaaaaggttcatctccatggtcaaggtccgaatggtcccatgaaggaaggcggtctcagcaatcacattattggtggttcctgcatgcatggaaccaaaggtcaccacagcaccttcaattggatcgacatttcgactcacgaccgattggacttgggtaatgaagtaagaggctgctacaagagcgtcattggcctcatgtggaaaggcagcatgtcctccctttcctgtaaaggtgatcttgacttcacaggtccctgcaaaaagggtacccgtattggtcgcaatgtctcccaccttcaaatcagggcgtacatgcagaccataaaattcatcagggagccagtcgccaaaagcattgtccttatacatgagcatcccaccagcctcattttcttcagctggttggaagagaaagagaaggttattctttggttgcacttggaccagttgatccaaaagcccgagggctgttgtcatgtgcatatcatgaccacaagcatgcatccgtccttcgtgcttggaggcaaaatcaaggcccgtttgttccacaatcggtaagccatcgatatccgtccgccaaccaatagttttttccggagcagacccatggagataaaccaggatcccggtccgccaagtccgttgctcgacaaagtccttgctcgctgtgatctctgcgattcgctctaagaggtaggcttgggtttcaaattcttccaatccaatttcagggatttggtgcaaatcccgtctgattttgattaaatccaatgtcatagtcgtcttctttctattagaatagggagtgggaaagaactcctattatttaaaaggagttcgtcttcccacccccgcacagttgattaggtcatctttggagcttaatcaagcgaacaaagatgccaatcaatcactgcgtcatacaattattcccttcaaacatcaaaggctggacagtttttgcccagcctctaccattcatatcttacaaattacgcaaagcgtcttccaaggctgttttttgttgtgttttttcgtcaatttccttgatgatgcgagctgggacaccagctacaaccacattttcagggacatcttgagtaacgatcgctccagcggcaacgactgaaccgtttccaacttgaactccttcaatcacaacagcgttggcaccgaccaagacattgtcaccgatccgaacaggctcagcagaagctggctcaatgactcctgcaagaacggcacctgcaccgatgtggctgtttttaccaacagtagcacggccaccaagaatagctcccatatcgatcatggttcctgcaccgatttcagcaccgatgttgatcacagcccccatcatcacgacagcattatcttcgatggtcacttggtcacggatgatagcgcctggttcgatacgcgcatttagatagcgcttatccaacaagggaacagctgaattacggccatcttgttcgaccacataatccttattctctgttaagttggcaagaagcggctcgatatctttccaatcaccgaacaacacattacctagttttgtgacagaagctggaacagctgttgccaattccccttcaaaggttactttcacatttgttttcttttctgcatttccaataaaagcgataatttcttgagcagacattttttgtgcagtcatgagattctccattcatttcaattaaaggtatccatattataccacaaacccaaagagatgaacacctaaggcgacgtggttgtagcctgatcctccaggcctgtcatttcactgatggtgcgattgcttccaaagtgaataatgactgagtgcgaatcagaaagtttatagtaaaagattaagaaggactctgaactcatcatactcgaccaagaaacacggctaggaattccgactgtattcacaagatctgcatagctggttcctattttaatattggcaaaatcctctctattcaaactgccatttttattggctaatcgctcactgtttaagttctcaaaattaagagaagatagacggctactaatcatatttgaaagcaaaacagatacagaagaaggggatccttcaacctcataatccaagcttgtcatgaaaggaccgacactaccctcttggtaggtttcttccccactactagccttgcccagtacagctaccacatcctgcggagacagataagttgaagaggtacgaccttgatccccctcacttaaaccaggaatcagggaaatcgccttctcataggtcacttgaaactgaaattcaccttccggtgcaatcaaggtactcgtaccactcttcaaggtttcctttctggttccataagaccgaccagtgcttccgtattcactagtagtagaagaaggatgttcctcactatggatacctcctgaagctagataggcaaataatcccagcatggccaataatccaaaaaaggctgccagcgaagaccctccactattagaggaaggagagtaggttttcgccctatccgattgggagtctagtaccgtttgtcttggttctgaatgcctgcctccccctattgaagccagatcggcttctgaaatcaagcggctcccaccctggtgctctacttttttctcagctgaaggagactgccctattgtatcttgtgctggtgtttctgaccttgcttcttctgttagtggtgtagcaagaacgacctgagctgattcgtcttcaggtgtagcaaatgagccttcctttggatcatacgattccttcttcacaccaatcgctggttcgtcttttcgttcctcttcttgtttcacctcttcctgaaaagcagggacttctaccacttctggctcttttgcgagcgtatcttctagcttctcaggacttcctttttctaagggtgtttctttcggctggcctttcgaaaaccgactctggtgctcattttgtagatgcgaccagtctttatttcccattgtcctctccttttatttaaaatgcttcggctgatttttttactgtgctgtagatgtagaggaagctggtgtggtcgctacctctttcgatttgatatccttgatggtttgccggctatcaaaatggatttgaaccgtttgagaatccgataatcgataggtaaaggaaggcgcttccccgtaacctaaaagcccagatacatctatttcatctggaatccctaccgtattgagtaggtctaaataaggcattccgaccttgatagtggcaaaatcgtccttcgtcaagctcccattcttattcgcaaatcggtcactttttaagtgtttcaaacttaaaagagagatcctgtaaaaggcacctgttttttcaagaagaaccttcccatctgcatcctttgattggtaatctaaggtcagcaaaaagggactggaactgctatcactatactttgcttccccactccttgctttacctaatgctgcaacgacatcttgtgggtctaccgtcccaaaagaggtctttttttcttccactgcaaaatcaggaataagagacatggccttttcataggttggctgaaattgaaattcattagctgaggcgatataagaactattttcactggtcagatattccgttctgatactatcacgtgataaaccattgatcccctcactcgaaaaagatgaagaagagcttttattaacttcgttttgaagcacaaacacaaaagccattaacaaggcgaaccacccaaaaaatcgcaaaagcgaaccaatcctctcttttgaggaagaaggggaagacgccatcgtatctgaatggcttctagtatcctgatgattgtccatccctattgaagcaaggtcagcctctgaaatcaagcggctcccaccctggtgagatgaatctgccttgatatctgtccgatgattgtccaatgatgtctcctttcttataccaacactaatttcttggcttttttcttgaattccatcaccacttctggctgccctggtagctggtaagtcgcgcgatagcccattccgccatctggcatttccccccagaccaagcgttgaggatttcctagttgctgaataagctgggcgaattctgtaccttttttctctttttcagtagtgatttctttctcactgcttgtcttctcttttgcgtccaacaaattcgtcgcatccaccatcatcaagcgatacccctggtctttttcctgttcaaaccacaaggtcacacttttcttaccctgatcggtttgcttagctgcataagtcaagacaagaacggttttatctccttgagctgtctttgtatacttaactttttgggcttttccccattccgtcacaattgtttccaagcgggttcctggttgctgactctgcttgagacgaactttcaaattcgccacagcttcgatggtccatttaaactgcttgatttcttgttccttgctgaccaaattcttgtaatcctttggctggaaacgagtcagtgtttggtcctccttggtatcggtttcctgctcctgcacctggatgcttgcaatcgcaagtaagagtcctaaaacaaaacacaaaaacggcagcaagagttcttttcgattctttttcatccactcgatcatctgcttcaccccttcttcgtcaaacgatattgaccactctggtcacgttcaaaggttaaagagaccagtccatctgtcacctgataagacagggctaggacttgcttgtcctttgcagaggtcaaactaagagaattgggaagacctgattttttcaagacatcttctactgctgtccccttttccttttttccatctagcgtctgatagcctgtaaaatctgccagttttacgttctttttgctctgatagtgagccgattggggcgcaaagccttgaatcgagctcaaataaaaggtatcatcctgcttttgaaatcctatggtataaggatgaatcccctgcacaggagtcccatagcctagctggacttgcgctccaaaactcgtatcttcttgtgtaaaactcgctgcttttccaaattttttgacgaatgcagacaaagtcacccaatctttttgcgtctttccttcttcccttgcaaggtccaatgacaacaagtcttctaaagccggctctttggaagaagacgcaacaaattgctggctgtcttcttgcatgcgagacaaactcaacaagcgatctttgggcaaagttttcactggatgaatcataaacaccaagcaaacaccaaccataaaagccagcaaagcacttgcagctttttggaggatccgcttatgatgttctatccactgtttcatttcttccatccttcatgctctttctattcaaactctttctattgtatagaaaattagcgtatttgtctcgtcttatcccaaaaaagaggcgcttgcctctttcttttattcagtgatttattagctgtctttactactcaagaggaaatctccattttcttggcgaataaaggtcaaatctacatagtccccgtttttcttttggaagtccatgaccaattctatctcgtctgaatcatcagatgaactcaccgtcagattgactgcatcaccgtatttttctaaaaggtctttgtaagaggtccctccagcaccggtttcactatctccaaccttgaacccatcagcaaagttatcctcaaccgtaagatttttcccaaattgattaaattcaaatttgacaagctggaattctttcccgttcttagagtaagtcgctttgacctctttattataagagttatcatcccaaaataatttcaattctccactttcaaattgaacggagctagctttcccataagcttcaatcatttcctcaggagtctccccagcatcctttctagtcaaaaactgaagttgttcgatatcagattgttcccagctaaaatcagcttccgcatcttcagaagtcaattgctccaaatcgatattggaagaagaaccagactggttacctgaccaagaagtctgctttctagatgatgacgtgctagggctagcatgaccaatcaaatagccactgactccaccgataagaatcccaactaaaatcccaagggcaaaacgaatcgccttcttgtctgcagtatccatcggtcttccaacaggagaaagaggagcttgtggaataggtgtctcaggaacaggcactgtctgcggaccaattggttcagctgccatattttgaggagcttgtggtgcaggctggaatggaggagtcggttggggagcaacaactacatccggatgttctccaacagttgcttcatccatctttggaggctccactgtttctgaaacagctggctcgtctgcttcttctttcattgcttccgtctccgtcactgaaaggccactagcttctggaacgaccaagtcttcggcttcttcttttgggacaaaggctggcgcagccacatcaaattgaggcgcaccctctacgggagtatgtttcataaattgttcttgatctttctcggacatttcgaattctcctttttattcttctcttctactataacataaaaccaagcaaggaccaactcctgtctggatggactaaaaaagatcggagagatatccgaccttttagatgcttatcttaaaatttcttgcgaagggagacaatagcaagccctgcaagtgagagcaagcccaatgttgccaaaacgacacctgtttcttgacctgtttttggcaataaacggccaacgacagatttgcttgagtcgcttgaatttgaggaagaactagaagaagagcttgagctcgatgaagaagttgaacttgaggaatttgaagatgagctgcttgaagatgagctcgatgagctacttgagctagaagacgaactacttgagctacttgaactagaagatgagctacttgagcttgaagatgggcttgttgtacttggtgaagtggatcctcctgtctcagaaccgttatagcctgcaatgaaattacgataaattgggtttgaacttgcaagtgaatccaccatcaagcgtcctgacccatcgtaagcaagggacactgttacttccccttctccattatccaactgtttaaagcgaccatcatcttttgtggtttgacgaatgtagagtttaacagttccagaattcagtccagagagatccacatcatcaaattcgatcgtcccatctgctgtattttgccctttagcaacggtctcttcttcgccaccttcagatttgtaaatcaatgcaaattggtaggctcctgcatcatgcgcactttctttcttgccttcacgcgctcccactacatcgacacgacctgttttcaatttcaaagaaagctgattcgattcaaaaccttcataagttggttgttgaacaaggtctagctgaccatttttgtactcataaatcgcagcttttgtattcgcagaaaccgggtgagcaacagccattccaccaagcatagatgaaagtaacaagaatttagccaagttctttttcataattttcattcccttttcaattattttcattcatcttttattttatattatgaaacaacaaatgacaacttttatattcaaataactttttatattaaaggatttgagtataaaatccgtgccggtaactattgctcttctagaaaccctatagtatcagtagtttagcaatgagataaccatatgatcaggagaaataactagctagtgtttttatagttgaatctaaggggaaattttatgaaactattttgcagacaaaaaaacgacctcttacgagatcgttttgtctattgattaaagacgagcgttgagttctgctccaagttcttcaaatcctggtttaccaagaagggcaaacatatttttcttgtaagcttcaacacctggttggtcaaatgggttgatcgcattcaagtaacctgaaagggcgattgccaattcgaagaagtagatggcataaccaagagtgaaggcatcttgctcaggaagagttacgtacatgtttggtacgtcaccgtctgtgtgggcaagaagaacaccgtcagttgcttttttgttaacgaagtcaacgtcttttccttgaagataaccaagtccgtcaaggtcttcttccaaagtagggatgatcacgttcttacgtggtttgtccacacggacaactgtttcaaacatgatacgagttccttcttggataaattgacccaatgagtgcaagtctgttgagaagtttgctgaagttgggtaaatacctttttggtcttttccttctgttcaggcacaccttatggatgcatctgctggaaattcccttgcactggctggctagtttgattgacttcaagctctttgcgcttgaccttgaccgtctttttctggcatgcttttatccttataaattttgttgatttgtcatattgcgaaaacattgaaaaacaatgacaaattttacaatattaaaacataaattattttccctatcaaaaagggagtgggaaagaacttcaaacaagttaaaaagttcatcttcccacccccgcacagttgatcaggcaatctttggggcttaaaaagcgaaggaagatgccaatcaaccaccgcgtcatctattttttctaatttagacccagaagcctggactttttgtccaagctctgaatcaatttttttgacttttatgtttctaaattgcttgattttaaattttgttatggtcaagcagtttcgaaaatctgaatggtagagtccttttcaattactactgcttggtctgctgcaacatggagagtgcccggcaggctgccctcttttgaaccatcaaaagaaatcgtgatatggcccagtccagttaaatttttttctactacatttcctacggcagtaatcgaatattcctgactatctaccaccagctttccaccttctagtattgcacctagaagatttttgttatcgattttaaaacaatactctgctaagtcttccggagcttcttctccaaacaaaatgagcatattggcatcttgaatcatattctgagcttcaggccccacttgaattactttagcttcaaaaattttcttcatctaattcctattcatcctttctcaaatctgtcataaacttatgcttatagataagtttaacataatagttgctatgtttacgtgcatctatcaaaggtttactgataaaggccaatactagctatccaagctactagcacccgcggaacaccattgagaaagcgtgaataaagcacagaagggacaccaacctcaactgtttcagccttggcttcagatagaccgagtgctacaggaatgaaatcacaaccgttttgagtgttgatagcaaatatagctggcagagccatttggggcggaatattccctttgccgatttcaactccaattaaggttccaataatctgactgataacagctccggggcctaacaaaggagataggaatggcaaggaacagataaagccaatcaaaatgagtccccagatgttcccagctaggggaaccattaattttgccagccaatttccaacacctgaaccttgaataaccccaatcagcaaggaaacaaaggccatgaaaggaatgatcgtgttgagcattgtttggatggcttcacgagcagcctggttgaaagtcgcaacgaccttcccagcgcccatcccaattcttgctacaatacttgtttcagctttttgctctgtaatttttttactagtatcgtaagttggcttttctgttaccacagttgtcgctttttcgtcttcattagcagcagaaatttgattaaggccaactgctgacacatagatttcctcggttatatattgagctagaggcccacttttccctgtagctacaatatttattgtagggatcccctttttaggataaataccacagcgaagagtaccgccacaatccacgattgctaaagcaatttcctcatctgggatagaagttttaaacccattaacagcttccataccggtcaaatcagcaattttatccacaatatctggcttttctcctccgccagtgatatagatgaatttatgcttagcttcactaggtgtaatgaccaaaggtcctccgaaaccgccatttcctttaacaacttttatactcttatatgacataatttcactctttctataaatcaaatgttttactcaaggtaacaccttgctgttttgctacataagcagttgtaaaatcggtcacccaaccgcctacaaagttcatgacaagcccaacaagcatgtaacgaatggctaagtccatttgacttaaacctaaagtttgaattcctgttgcaattcccatccatacaaacaattccccaggattgatatgcggaaatacaccatttgaagtatggcagaactgcatctgagctgctacaaaactaggtttataatattctggtaagaaacgtcccatactgattgccatcggattccccagcataaaggctgaaatgaaaggtaaaatcatataccggctaacaggatttttggcagaaatcttagccagggaattgaccttctcttctcccaagaaagcgataagggtattcattgcaatcaatagcattaagacaagcggtacaatatttgtcatccagctaataaaggtttctccacctaattggaagagtttcataaaactctctgcaaaatttgtaatgtgattcataaggaactccctttcttattttttttaaataactgtttaatagataattgtaagtaattcgcataaaagccgaatcccagaaaagaatcagatgaacttgtctctttctcaatacctgcctcatgccaaagatagacttttctagcatcttctatggctgattgcatcaacttattttcttttctcacaagaggattatacttgtcaaaataatggatgtcttctccaacataatcgtccatattttgaaaacgtgctaagattgtgactccttgcattttgctagctttaagaacccgaccgttttcatcaaccgcgaacatgacaatcgtaccggatttgattcttccggacttcctgccaatcgctacgcgccccagtcttcggagcatcgtataggtcttattgaagtctttgagttgctgccagccgaggaacatttgaaatatataagctgccatgacaaatacagcgaaaattattagcgaattcattaaaatactcctttgctcttagaaaatgatagaaactctgtctctgtttctacagccctcaaagcttcttttagagaaggctctcctgcaattcgaaaaatgtcgtcatacaattccagcaattcactctccattttgctttcaatttctgagggaatggcgactagaaagataaattcaatccaatcatctcctttttgataaggctcttctagctttccaaacattaaaatagtctttgcataaccctggttaattgtatgggggaaggcaattcctccaccaaaaatggttgattgttttttctccctatcaattatccgatttctaaaaccttcatcaatcatctgaagtttctctaactctgcaaccatatttagcaagtattgctgataggttttttggggactcaaccgaagaaaacgtaagctgactgtttctagatttttttgatgaaaagcattggccctctgccattcttcccgcagccattgatcatcaaaaagatgattaacttgaatgactggagatttagaatctttatattttagaggaactgtcgtaaaaatcgcgaaatagtcctgattcaaatccagattaaaatcctcttcagaatactgagtaatgtctacatcatttccaaggatttgtctgagttgctgaataatcatcgcagcagttcctcttcctgttgtgcaaactactgctatctgcttgcgagaaccatttacaacagagttttgctttcttaaaatcatttcaaaatacaaagccagatatccgatttcagataattccaattcagaaccaaaaattgcagacagttcttctccagcaattttcgccatttcaaaagcaaaaggatattgagtttgaacctcgccatggaatatatcattagcttgcacatggaaaatcagtcgattgattaaggggcctagatgagacttgatttcttcaaataattcttcatcatcaaagttaaccaacattgtttctttgactttcttgacaatcccttgaaaaatgtttgcaagctgttcagattgataagacggcttgcttaaagtgtcaataaaacggatattaaacggaaaacacaaaaagtctatttcaaactgactgagggaaatcttataagtcatctcaatatgatagattaatttttcaaccaaaggtgtctctgttaaatcattcctatagtaaggaatagggcaactcaacaccctagatgcataaatacgctccaccataattgaaattgtctttcgaaggagttcctttgtttctttcgggattttatactcctggagtagcgtctccagaaaagaagatgttgcctcggtgagtgtctttccttcaaagtaaggggccacttggtgaatatagagcaagcgcaaattcagctcggaccccaagacctccagcccacggttgggctttcctgaaatagtgatagagtaactctctgccaaagattttacttgttttaaatccttattaagggtacttctactaacacctgcctcctcagccaagtcgtcaataagaagaggggaggttgacttaattaaacgttttagtaaataggcaattcttttactggaagaattgaagtcactctcccgttttaaactaccagataaaatcctttccaactcagtatagtcatacacctctaacattaacttatcatcttgtgagataatctggatactcggagccaaaacatcatttaattgttggatactcttttgcaaggtttgcatactaatatccagctctgagcgcatatctaccaaggaataagttggctgtgagaccattttttctaaaatgttataccatcgatttactatggtcaactctcttcctcaccttcatttttttaaccgcgagttttccccccggcaatatttgtagtgactccagttatatagctagaacggtctgaaatatagaatgctacaaggtcagctacttcccgtagtttaccacttcgtcccaaaggagttgttgaagttgaagcataaccagctcgaatatcttctaccgtctttccacgggtataagcaagagcttcctcataagaaagagttcgaagtcccgtagcttccataattcctggagcaattccaaccacacgtacaccatgcttacccagctcttttgcccatgaacgagtgtaactatagactgctgcttttgtggcagcataggcactttgtccttcagaaccttccaagcctgcttctgaagccatgttcacaattacaccttttccatttttcactaaaatacgtcccactgcctgactaaccagatacaaacctttttgattaatcatcgttactttttcgaacgtctcatcgtccaattcgtaaggacctttaggattttctgcatcgattaataatctagggatattaatccctgcattattgaccactgcatcaatattgccaaatctttcaactattttggcaacaccctcttctacttcagagcgagaagttacatcaacttttacaaataatagatttggatgacgcaaatcgttgtcgctaagatcgaaattcgctacattgacacctaattccagcaattcttcaacgattgccttaccgatcccagatgacgcgccagtcacaagaactgttttgccttttatgtttaaccaatcattcattttgatacctctcaaattttatttacaaggcaattatacagcgctttcataaaagaattaagacactcttttttatactgttcaaaaaaataataaactaattatgaggcttgtactaaaaaatccacaagaaatgaacttgtggatctctttttatactctaaatgaactcaaggcatataagaatcaaaggcgtgcattcagctcagcacccagctcttcaaagcctggttttccaagaagggcaaacatgtttttcttataagcctcaactccaggctggtcaaatggattgataccattcaggtagccagaaagagcaatagccaactcaaagaagtaaatagtgtagcccaaagtgaactcatcttgctcaggcagtgtcacaaacatatttggaactccaccatcagtgtgtgctaacagcactccatctgtagcttttttattgacaaagtcaacatcttttccttgcaagtagccaagaccgtccaagtcttctgccaattcaggaatcagcacatttttgcgaggtttatctacacgtacaactgtttcaaagaggatacgggtaccttcctggataaattgtcccagagagtgcaagtctgttgagaagttggctgaagttgggtaaatccctttttggtctttcccttctgactcaccagccagttgcttccaccactcagagaagtattgtagagatggttcatagttagctagaacttctgtcagataacctttacggtacaagatattgcgtacaactgcatattgatatgcttcattttcagccaacttatcagaagcataagccttgcgagcagcatttgctccttccattaacttgctgatatcagcccctgcagctgcgattggcaagagtcccactgctgtcaatactgtaaaacgaccacctacactatcaggcactacaaaagtatcccagccattagcatctgcttcaaccttaactgcacctttagcgcggtctgtagttgcataaatccgtttatttgcttcttcctgaccatacttcttaaccaagagttctttgaagacacggaaagcaatagcaggctctgtagtcgttcctgacttagaaataacgttgacagagaaatctttgtctgatacatagtctaccaaatcagccaaatagcttgaagaaatagaatttccagcatagaggatttgaggtgccttgcgttcttccttgctttgtagatttacaaaagaattattcaagaaatcaatagctgcacgagctcctaaataggaaccaccaataccgattacgatcaatacctcactatcagattggattttagcagcagccttttgaatacgagcaaattcatctttgtcatattcttcaggcaagttcaaccagccagtcatttctgccccaggacctgtaccatttcgcagagcagaatctgcagcagtcacttgaggctgcatataatctagttcatgtggtgctacaaatttatctaacacctttgagtagtcaaatttaatatgtgacatgtttatcctccaattgttcttttcttttatgataacgctttaagaaaaaataagcaagtgctttcactattttaaaacgtttacattttatattctatactatttttctaaataagctaaccttaggacataaccgagagcactcgtttgcgtaagacaacaaattttaggcctattgagaagaacaattttgattgacaagaaaacaaatacgcttcttaagattggatgtcagctgaattcatttcaggtccgttcaaactagattcgctgctccaatattcatctgcaccttttaggcttgattcattatacttcggaacctagttctcactttgttcgaactgcgtcaatgcacctaagttcatccgcgtccgttggacttgattcactaagggctatcataggtttacagctttttccctagcgggaaaaactgcatccattgctctaggattcttctgcgtcccttggacttgattcatcaagagcaatagaaaagagcacacagttcacttcgcttagggctgctggattcctcccctgacccgcttcacgcagaactgttgctccgataggtattatatcataatttgttcgatttgcaaaggtccggtttttattcttgtgtttcggccttggctgcgagcttggcttgtttttttcgttcccgaccttgtcggaagaaggtctgcatgatggctgcacattctgctgccaagattcctgtttctacttcgactcggtgattgaggcgttcatctgccaaaatgtcgtagagactacctgctccaccgaacttctgattggtcgccccgtaaatcacctggggaatccgagctagaccaatggcaccactacacatgacacagggctcaatcgtgacaaaaagcgtcgtatccagcaggcgccagctattttcacgctgattggcctcctcgatcgccatgatttccgcatgcatgaccgcccgctgcagctcctcacgcgcattatgtccacgcccgataatctgaccatccttgaccaagacacagccaatcggtatttcatcattggcgagggcaatctccgcctccttcagggcttccctcataaacatcgctttttcctctatcgtgtagtccatctcttccttcttccttttagtttctttgttcattataccataggcagcttacgactcacaaaaaaagccgccgattgggcgactcttatggaagattattatgaaaaagtttaggaggtttaaacaaagttaggaggtctttgtttatgcttctagtatagctggcctatcttaaataaagcttaagttctctgagtattgatgattttggaaatatcaccacttagaatctcaaaaatatctgacaaattgctggcttactactatccgctttgtcgcagaaccaactattgtggcatcgctcatcctttacgtaactcaaggatttggtcatagcgctcttcttcatcaatatgatgggctatttctagtaccgtgatcggcaaagaaaagattaggtctctaaccagacgactatttttttcgtccaaagctgatgtcacttcgtccgctaataaaatatccttctcgcgtaagagaaaacgagccaactctaatctgacacgctgacctcctgaaatgttttcaccattattatgaatttctacattcaaaatatcctgaaattcatctattaagccaactcggtccaatacctccaataattcatggtcctgaaagggctgaccaaaagttagattatagcggatagtatcgttaaacaggaagggatgctggctaattaaaccgatattcccttggaaatgactcgttatttgatttccatcatactgaacgaaaatgtcaccctcatcacatacttcttctcctaaaatcaagcgaaaaagagtcgtctttccagacccgctcggtcctttgattaagaccttctgacctactgaaatcgtcgccgtcaaatcagaaaaaagctgacgttcagcaaaactttttgaaatatgatttaagcgcaacgattcgagattttcaacaaattgatcctttgtctcttcgaaatcaggttcttcctcgataatcttaaacaggcggttcgcagtcggcaaggcaccttggagattggctgcactgtacatcagagtttggatcggttctaccagcatccccgcagcaacatacatagagatgaggcttgtaatagaaatagaatttccctgtaaactcaaataaaagcctaaagcaagaggaacaacctgactaaaaaagaccataaatccattaaagaaaaaaataatattatgtgtgaaacaaaatctttggatggctttttgatattctccgtttaaatcattcacgcgctcttcattcagcctcatggcctgattaatccgtaaggtttggctgccttgcatactatccgagacaagcccatgtaatttcgttctaagcttggaccagctgtctcccgaatcttgtaaacgacgattcatgatgaactgaggaataggtctcataatcgtaaaaatgacaaaaataagtcctaagagaaaattttgtgaaacaatataaatggctgtaacaagggcgacaaatccccaactcaccataacatttatattttccaaataattatcgcccacatattccatatcttgagttagcagactaactttttcatcattggaaaatttaggattcaatatgactttcttaaataaaagggcacggacacttttgttgatttctcttcggaatatattgtgcgaatagtttgaaaacagcatcagactataaataacaagatagacagacaaaccaaataaaacaaaattgagaatttttccataagaaaggccgtcttgatctaacttcaaggccttcgttaaaatcagaggttgcgccaacaccaaaccactattcacaatacgccctaaaaaaataggaaaaagatacttcttatcaatgtacttataaatatttctcataattatcatccatcaaaatagagggctagcacaaccctcttctctaatttatttaaaatcgtgattatttacaatcacaattatagttaaatactctaggtttagcattcattttgtcatcgaatttgttattcactttaaccttcaccgaaaattacaatctccatgtgtcaaaattgttagttccaataattcagcatctgtatcgcttattttagatagatacttttcgacctcatactcaccctcacttaaatatttatttttatcaagataagcatgaaactctttcctaatcacatcattgctgtcgactactctattcaattcattcgtaagaaaaaatgaatgattggttttagtattaaaatacaacgtaccatcatcagtactatattttaatatatatcgtgacaaattcatattatcacctcttaatctgtgtgacttaacctacagtaagtatacaccgatagaaatattaaataaagcaatattcagcagattagaaaagttccaacttttaatattttggaaaaggttatcctataaaagctgcaatttcgccaacttcttgagcaatataggtggcgccggcttcttccaattcttccctgcttccaaagccataaaggacaccgatagaatcaaacttttgcgcttgagcgccaagcacatcgtgctccctgtctccaatcatgatggtatgcgccaaatctgtaatcccattttgctccaaggcatactggataacatcgctttttttactacgttttctatccatggtcgcaccagcgacaaagtcaaaataatcatacaaaccaaagtgtttgagaatttgaatggaaaattcttcaggctttgacgtagctacaatcaactgtttgccagcctgcttgagagaagccagcaagtcaggaacgcctagatagacctcattttcataaaggcctttttcggaaaaatactcatgatagtagtcaatggcctttaaacattcttccttagaaaatccataaaagcgctcaaaagactcctgcaagggcggaccgatgaaaactctcaatgctttcttgtctggcacttgaatcccatattttcctaaggcataggccaccgagttggtaatccctagttctgaattggtcaaggtgccgtctaggtcaaataaaatcgtttgatacattttttcctctttctgctttcaaaaagaggctgggacaaaagtcctagcctctcaattatctttggattgtcgagcaagacgcagtggttgagtgggctctactacgctgatttcatcagcttttacagccctactcaactgtgcggaggtgggacgatgaaatcgaattctaacgaatgaccgatttctgtcccactctcttatcttcatttgcttataaactagaccacacactttcaaggatattggtttggtcacgatctggtccgactgagaaggttgaaatgcgcacaccaactaattcaccgacacggcggacatagttgcgggcattttctggaagctcatccaagtggcggacacctgtgatgtcttctgaccagcctggtaattcttcatagattggtttgcaacgtttgagttgctccaagcttgctgggtagtggtcgatgcgttccccatctaagtcgtaggccacacagattttcactgtatccaagcctgatagaacgtcgatcgagttcaagcttaggttagtaattcctgaaacacgacggctatggcgcatgacaactgagtcaaaccaaccgacacgacgtggacgacctgttgttgtcccatactcatgaccgacttcacggatccgatcccccacttcatcaaaaagctccgtagggaatggtccatcaccaacacggctggtataggctttacatacaccgacaaccttgtcgatcttacttgggccgacacctgatccgatggtcaccccacctgcaacagggtttgatgaagtaacaaatggataagttccttggtcgatatccaacataaccccttgggctccttcaaagagcacgcgcttgccgttatccaaggcatcgttcaagatgacagaagtatcggttacatattgtttgatctgttgaccatattcatagtattcttcgaagatatcgtcaaatgaaagaggctctgcatcatagagcttggtaaattgacggttcttttcttccaagttgatacgaaggcgttccgcaaagacgtcgcggtccaaaaggtccgcaatccggattcccacacgcgcagccttgtccatgtaggctgggccaatccctttaatcgtcgttccgatcttgttgtctcctttagattcttcttggagacggtccaattcgatatggtaaggaaggatgacatgggcgcggtctgaaatgcgcaaactgtccgttgtcacaccttcttcatggagataagccaactctttgaccaatgatttaggattgatcacaaccccattcccaatgacagaaatcttttcagggaagaagatacctgaaggaatcaagtgcaacttgaactttttgccgtcgatcacgatagtgtgaccggcattgtccccaccttggtagcgagcaatgacttctgcattggctgataggaagtcagtaatcttcccttttccttcatcaccccattgggttcctactacaacaactgatgtcataattctttttcatataccatagataggatgctatctatgcctttcttcaaactaagggcaggagtctcacctgcaagtttgtcttacactctattataagcaatttttgatgttttttcaagatccactcagctatcgtttatttttctccttcctttttaaaccaacttctctatgaaactcgtcttttacttggaaattgcttctttctagaaataacgttcggaattttcttttcttcttgcccttcttctgaaacggctgattttcggaattctccttgcccccactttgcttgatttgtgctaaaatagtaggtatggacaaaattattaaaactatctcagaaagcggcgcttttcgtgcctatgtactagacagtacagaaactgtacgaacagcccaagaaaaacatcatacacaagctagctccacggtcgcacttggccgtaccctcattgccagtcaaatcttggcagcaaacgagaaaggagatactaaaattacggtcaaagtccttgggactagctcacttggagccatcatcaccgcggcagataccaagggaaatgttaaaggctacgtacaaaatcctggagtggatatcaagaagacggcaactggtgaagtcctggtgggaccatttgtcggaaacggagaattcctggtcatcactgactatggtacgggaaatccttataactccatgacccctcttgtcaccggtgaaatcggagaagacctggccttttatctgacggaaagccaacaaacaccttctgcagttggactcaatgtcctgttggacgacgaagacaaggttaaagtggcgggtggcttcttgcttcaagtcttgccaaatgccaaggaagaagaaatcgcgcgctttgaaaaacgcatccaaaaaatgcctgctatctccacacttttggaatctgaagatcatattgaagctcttcttgccgctatctatggagatgaacctttcaaacgcctctctgaagaagaacttcgcttccagtgcgactgcagccgtgagcgtttcttgaatgctttagcaagtctgccagctagtgatctaaaagagatgaaagatgaagatcacggtgcagagattacctgccaattctgccaaacacactaccactttgacgaaaatgacttggaggaactcattcgtgacaaatcttaatacgccatttatgatcgggaatgtcgaaatccctaaccgtaccgtcctagccccaatggccggagtgaccaactcagctttccggaccattgccaaagaactgggggcagggctcgttgtgatggaaatggtctctgacaagggaatccaatacaacaacgaaaagacgcttcacatgcttcatatcgatgaaggagaaaatcctgtatcgatccaactttttggaagtgacgaagatagcctcgcacgcgcagctgaatttatccaagaaaataccaagaccgatatcgtcgatatcaacatgggttgcccggtaaataaaatcgtcaagaacgaggctggtgccatgtggctcaaggacccagacaagatctactccatcatcaataaggttcaatccgtccttgatatccccctcactgttaaaatgcggacgggttggtcggatccttctctagcagttgaaaatgcgctcgctgctgaagctgcaggtgtctctgcccttgccatgcatggacggactcgggagcaaatgtatacgggtcatgcggatcttgagacccttcacaaggttgcacaagctctgaccaagattccatttatcgcaaacggagatatccgtacggttcaagacgccaaacaacggatcgaagaagtcggtgctgatgcggtcatgattggtcgcgctgctatggggaatccttatctcttcaaccaaatcaaccactactttgaaacaggagaaatcctgcctgatttgacatttgaagacaagatgaagattgcttacgaacacttgaaacgcttgatcgatctcaaaggtgagcacattgccgttcgtgaattccgtggcctcgcccctcactacctccgtgggacttctggtgcagccaaactccgtggcgccatctcccaagctagcaccctagcagagattgaagaactcttacaattaaaagcatagaaatacaaaaagcgagagtgggacagaaatcggtaattcgttagaattcgatttcgtcgtcccacctccgcacagttgagtagggctgtaaaagctgatgaaatcagcgtagtagagcccactcaaccactacgtcttgctcgacaatccaaaaataattgaaaggctaggacttttgtcccagcctctttttatagattatctgtttgcaggccgagttgtttgactctggcggtgtagtaggtcatgatcaaaaagaggttggctgtgatcaaccagatggaccattggtgaatgaaatgcatgaggatggcgacgctaatagctcctgcaacaaagcttccaacaacaatcccgtaattcatggcctgacgccgatactcgtccaaatctccctttcctcgagtgattcggtacaaggccgtcagcatcttgcggtaatttccggaagtcataaagatcacgtaaggatgggtttcaatcaagcttcctgtaaaggtcaacatcatcatccctgtcccaaaagcaataaagggaacttctacaggtggtatgacagacaccaagggaatcaggagtgtcaccacaaacaaaggaatcaacatcttgatccgccaaaaggctgtcttgcgatactctctgatatggagggcaaccacaaagccgatcgagaaaaataaaatagatgaaaaacgcatgatggtattttcgacacggggatcgtgccaatcagcgatgagaagcagtaggttccccgtttgggtcgcgaccaaactccgatagtgcatgtggcaaaagacatcgaggcctcctcctataaaaccaagcagagcccccatcagtcgtgtattttgtggtaaaattattttttcttccatagtcttgtctcttttgatttcaattatgattattataccactttgcacacaagtggagcaggaaaaatcagaaaaagcccttggctactactagtaactaagggctggtagaatgaaccccgctcgatctactgttttaagcgataggtcttgcgtggttttttcttaggtacccgcttgagacccacttcttccacgaattctccgaattttacgaggaagttattgctaacgatgggacgtcctggattgatcaaattgaccaattcggttgcttcataaacggtgaaaggctcctctaacagatagaggaaggttggattccagtcgagacgtccctgaatccgcttgatcgattcttgaataatctggtagtggtcaaaagcaaaatcagaagcagttaaaacctttccctctagcaagcactgggactttttgaagtcgacatcgagaaaaacaacttccttggcatcgtcacctgcatgggctaagtctactgcttctgccggcagatagaccagatgggcgatggtaatgacccagcctctggggtcccgcccaggggtggaaactgtcatgagctgctccaccttattcactggcagatcgagcccaacttcttctttgacttctcggatacaggcatgagtcgcatcttcatcctttttcacaaagccccccaccaaggcgaggcggtgttgataagggtgggccttgcggcgaatggctaagagcttgagctgtccatcaacaaaacagtaagccaccatgtccgctgtgacacttggagtttcataagttggcagatcttgctccttgtaccacttgagaaagtctgcttcactagcgaccgtctcaaaatactctttctccgtcattcctgctggaattgagagacttgccatctaagccacctccttcttgagggctttggtccattggtaccagcccactaaactattgagcgtgtaaacccagtacatcccttgaatgtgaagactctgatcccaccagagatagatactaaagacgttggtcgcaatccagaagatccattgctcccggtaaaggcgggtcattaggagctggccgaccccgttggtcgcatcggtgatactatcgcggaaagggcgagcgctatggatgctctgatacgcaaagcccataccaatccaaatcacagcacacaaggccaagtagcgcatccactcaattaagttcaatttcttggcttcaaagtgagattcttcgaccttaccttgatcattgatccgattagagagccaaacataaagtccgattggttgcatgatgaagaaataaagagttgtcagaacttccccatagaagtttttattgagggctaaaacgagatagatagcggaattcactgctccaaaaaggtagttgctagctcgcccttctgcaacgagaatgacacagacaatgcctgtccaagaggcaaacaatcccagccaatcatgctgtcccgtacgattggtccattctaagaagaagggaacgctggaaagaagcaggagatagatccattgaaaggctgtgcgtcctacaaaaaggtccttccaaaggagtttcataatattgacaaagccttgttttttcgcttctcggtgaacatttttaaagtcttggctaaaagttgtgaatttttcagatagttttttcataagctgctccttagtcggcttggtagatggcatcgatcaccttcttggcttcttcgtagttgccgaggtagtctgatgcgaggaaagtggtcggaatgtttcctaggtattgctggcgcaattggtccaggtaatttgaaaagctgctgcggatctcttcgtcagccatggtcatatccctgaaaccatcattgacataagagccgatcggctggacaaagaggatcaaatcccatttttctttggacagaatactgacaaataggttgtcgaaggtatcggtcatgctggtatcctggccttcgacttccatatagtagtcgtaataacccttggtcaccagggaattggtatctgcgatgaccaggcctcgattggcactactatcgatgagcttggaggtttgatcatactgtcctaagaggaggtaatagtaatctttcggtgtgagttcatcatcccgaacattgttcttgatctggtattcacgggcatactcaagactaacaggtgcatcgtaaaagcgggctaaatcctttgcaagggtcgttttcccgttactggcgctccccatgatcaaaactttttttgtaaactggcgacggaagggctgggcgatgtatttccagtatttgcttggattttcccggatcatggtagcagagatcccgaagcgacgctcctctaagtgaacttcaaaccctctgccttccaactcttccttgtaggctttctcccccacataaaagatcaactcttctgtctctgtttgatactggatggtatcaagggctatttgtaaccaaggttcccagcccaagggataacgaggaagttccgtctcatctaacttatagacttgggtcaattcatcgtttgagaaggcttcacggatatagcggaagcgtttttgtaaggtcaagcccacttcttcgccacggtccccttcataaccagatacgatgacacgaacacgatcacactgacgcttggcccgttggatcaggtcaatatgcccttgatgaagaggagcaaaggttccaaataccacagcgattctttctttattcatagcaactcctttttatagttttttataaataggttttctttatgtttttattatatactatattttctggatgtcaacacttttttataaaaaaatatatttttcttcaaaacagcaaaaaaagatctgaaaagataagattttcttttcaaatctttcgacttttattcacgagtgagggagtggctgacaccgtctttaagaacagtcacactggatatagagccatcttttccaactacgatatctagagtcgctgcagacccatcgcctgctgagagattagcatggtaatggccgtcatccaaggtatagttataagcgctgataccataggctacgggttggcccccaggaagttggatggtcacttgaccaccttggccaatagtgactccagtgtcgcgtttgtcagaccaattcccagctgctgcagagaaatcccctgctgccacagaatagactcccttgtattgggcattctctgtagcagaagcttgcttcttagcatgggcatgaccgtcttctagacttggcaattttgctttcgctggtgttgctggagtggctacttcttttgtttcttttgttacgggtgctgctggtgtcgcttctttagctggagcaggtgtttgactagctgcagcttggttatttttgctaccaacagtatgactttcttctgatttgctatcagaggatgaagaggcaatcggatctttactagtgatcacttttttcttagaagagctggtttgtttgacttgactggtctttgaactgcttgcttctgaagttttttcttctttattcccgccacaagcccctaggaaaagactagctgtaagagctagggctgctagagaaatgatttttttgtttttcataacagaacctcttttttgtaacatttgtaatattttgtaacattattgtaacactgttatatgaggctgtcaatagtttctcaaatatttttctaatttgaaagaaattttaggtaagttcctaaactttgcaaaaaaagccggacatactgtccagcttttcttatttatacacttcttgatagaattcgatcttgtccccttttttaacggtagtttcagcagcaccttttggagccatttcgccattgatcttgtacatccagtaaagacctttggcttcatcttggctgtgaccgtcaatcgaggtgatcatgccatttttttcttcaatcttgtagttggctttgagcactttcatgaggttgctctcttctgctactttcaaggttttcgattgcgctttttgaccttctggcgtcacgctaatcgtaatcgaaatttcgtttttcttggcaactcctgtgctagaagctgttgtttgatggtttgtgctatgagacgaagcgcaactcgctaaaagaagagctgcaagtaaggtcatcaagctagaaatggtttttttcaacataaaatctcctaaagatttgatagataatgggatagaaaatgatcgtcgacagagcatgggcaaggttaaaactaaaaccattgaccaaagcataggtccaccaaggaatatggtatatcaaggtataaacactatcgatcaagaccccataagcaaaggacagtaggcccacaaaaaggatctgaaggacaaagggcaaccacttgtaactgatgcgccaaatgagcatcaaacagccaaaggcgacaatctgaaagaacacaatcaggctcatccccaggaaaaaggcggagacaaacatggtgatcatcatcacaagaaaagcaaagctatacccttcaaatatcaccaagagaaaaaagatggcagaaataggttggacatttgggaaaggggcaaaagcctgacgtagagcgacacaaagggccgccaaaagcgaaatacgggttaatcgctgaagcgtcatgacatcctcctagacaatctcaaacttgatcgttccggctgtcgttccaaccttgatggtttgcccttcttgggcttggcctttcagcaatagctctgctagttgatcttccacttcggtctgcaagacacgacgcagtgggcgagctcccatttctggatcgtagcctttggttgctagcaacttgagcgctgaaggctggaatttgagggtcatgccttgttcggccaaggtcgcgatgagcggtttgaccatgactttcactacctgctgcatgtcctcgcttgagagactatggaagaccaccttttcatcaatccggttgataaactctggacgataggtcttcttcaactcttcaaacatgcgtttttccatattggcctggtcaaagcgaatatctttggcaccaaagccaactgtcttatcatcccgaagggctgttgctcccagatttgaggtcatgatgataatggtattggagaagtcaatcttccggcctttgctatcggttaagactccgtcatccaagacttgcaaaaggacattgaaaatatctgggtgggctttttccacctcatcaaataagagaactgaatatggtttgttgcggactttctcggtcaactcgcctccttcttcgtagcccacatagcctggaggagctccgttgagacggctggccgcgaatttttccatgtactcactcatatcaaaacggatgagggccgattcatcatcaaacaaaacttccgccaaagctttggctagctctgtttttccgacaccggtaggtcctaggaacatgaaagaaccgatcggacgtttattgctacggatacctgattgattgcgtcgaatagcccgactgatactcgaaacggcttggtcttgaccaatcacgcgcttgtgcaattctgcttctaagtttaggtacttcttggcatcggtttgggtcagtttttgagttggaataccagatagttggctcaaagtcactaagacatcttggtcagtgacttcttttttgtagacaatgggagcggcctctacttctaagagctgggctgctttcttccacttgccatccatcaaagcccggtctaaggcggtcaactcttcttttacgtgaccgttggaatctcggttttgtacagtagctgccgcttcatccaagagatcaatggctgaatctggcaattgacggctggtcaaatagcggtgggcatatttgacagctgtttcgatcgcttcatcggtaatggtcacatgatggtggtcctggtaggtctctttcaagccttggagaatttggatgctatctgcaacacttggctcttcaatggtgactttcgcaaaacgccgagaaagggctgcatctttttcgatatgcttttggtactcatcttgtgtcgttgctccaactgtacgcaaggttcctcgtgccagggctggttttagaatattggctgcgtctaaggtcgaatcaataccggatcctgaccccataatggtatgcagttcatcgataaagagaatcacgtgaccgtcttcttcgatgtcctggatgatattgttcatccgttcttcgaagtctccacggaagcgcgtccctgcaacgacattcatgagatccaattcaagaacacgcatttgcgcgatttcagctggaacattgccactagcaacacgctgggccagacctaatgcaagggcggtttttccgacccctgcctctcccaccaatacaggattgttcttggtcttgcggctgaggatttggatcatgcgtgaaatctctgcatcccgaccaatcacaggctcaagctggcctgcacgcgccatttccgtcaaatcacgggtataatcttcaagacctccactggtgcttgggggcatgcccatcatatttcccatggtttggcggttaggattttgggcccgataaaggctccgaatggctttgatatcattcttatcccagcctgccttgtcctcaagattctttcgaagggaggcaataggaactcccttgtcttgctctgtaaaggcaaagccggcaaactccatgacttggctcgccaaggtcccacggtctgctagaagagagaggagcacatgctctgttcccaaggtcttggcatgaagaacctgggcaatctcccttgcgtgcttcataatggcttccatccgataagaaaatgggaagatttcataccgattgtcactttgaaaagcttggcctgtgatatgctccgctgcatcctgaaactcatcgatctgcataggataatcgttcagtacagaacctgccacgctatagggattattggccatagccgtcaagagatgccaagtatctaaggtgttcccctgatagtgccctgctagtatttgggccgcttctatactttctaacagtgctgttgaatagttcatctagtcggtatttccttttctatctacttgttgaatgatttttttcagcatcgttgctcgtaggatgagagcatctcgacctaggacctcatcggaggttgtcgcaagcaagagctgagtctcacgttttgtcaataatttttcttcatagagcatctggaggatatcattaaagacctgctggctgatggtctctccaatattggccgccaagtcttggagcatctgatggtgatctgaaaactggaccttgccaatgcggatatagccacccccaccgcgcttactttctacaatataccctcggctttcggtaaagcgggtcttaatgacatagttaatctgactgggtacaacctgaaagacatcggctaactcacttcttttgagctctgccatgccagcttgagccagcaaggccttgatataagcttcaatgctatcagatgtgttcttatttgccatgatgctcctttctgacttgtttttttctagatggatgctctgctctttggcccataaaaaatggccttggagtgttccttctcatcattgaccttatttgactattatacaatttttacggctgtaaataaagcaaagactccatggaaataggaatctcttaaggaaaggagaaaaacaaaagagagtgggccagaaatcggtaattcgttagaattcgatttcgtcgtcccacctccgcacagttgagtagggctgtaaaagctgatgaaatcagcgtagtagagcccactcaaccactgcgtcttgctcgacaatccaaaaataattgagaggctaggacttttgtcccagcctcttatgcgaagaaggagctactctttgcgacgagcgaatttggcgcctccgcccaagaatcctagaccaagaaggcctaaccaagcaaacaatccactttcttttgtaccggtttgaggaagttttccttccgattgtagagaaggacttttaaccacttctttttccggatggtctgaagtcaaaacagaaactgcttctggggttttcggttgcaagagaacaggtcttcctttttcttttttgtcttcagcttgagaaagagtcataacttctggttgcaccttacttggggtgacaggagtggttggagtcggcatatcagctatcaacggacttttttccgcttccttcgttccgacttctgtgatctggtcctgggcctccacttcgacaaaggcatcgacttctgtccgaatttctttgccttcttcttgtcgaacctcgatcaatttcaaccggcgtccgacctttcctgcttgaaggatccggctttcgcccttggccaagtccttgttctcacgtgtttgactctcaaatggaatctcctccgcttcgatgagaagttctggcttttcaagaatcaaatcccgaacaccttcttctggtcgtgtctgcgtcagcggttcataattgtgagcatcttctaagatggtttcaagggcttcgacttgattggctgcagcaaccaaatctgggcgctcttgatccaacaactgagtcaattccgttaattgtccttgaacagttggtttgaggtctgctttcaagcgctcgagagaagtagccttgatcttttctactccttctctgatgatctgttgcaactcttcttgactgagcaactgactatctttccctgagaggacaaatcggtccacctggatggctcgagatgagtgagggtcattgagggctggatccagatgcaagcgtaactggtggtagccttttgctaggccttgcagattgaccaaactctggtcgagcttgcgttggtctccatagccactgaaataatgatcgccgtcgatctcataatcatggccccgaccttcttcgaaggccatttcttttccatccaaagtgacgctgtagagaccatgacttgggtcgaccactcctcgaacctccacacctgtgcccttaaaggtaatggtcacttcaatgtgtttcttgccttcctcatcggtcacttggttaaagctcgaccaagattctgtgccattcgagaagtttggattgtctgtctcgtggtgccaaccctcactgtagtgcagttttggatcttggtcatctacttctttgcgattttctggcagctggtcctcgttcattacttgaactgtcaactctggaataaagccaaccaggcttccttgatctggatgcaacaatttaaccttaaagtcatagacgtcggtcgcttttcctgcaaaatcaagggttggaacttggactgttttttctgtttcgccatctgcgaactcaagggtgacgttggtatctttgtagaccttaccatgaaccccagttcctggttctgtgatcaatttgagactggcacttcctttagagccaccttttctcttgacgacgacttgcgctgggtcgcctttcttaacagctagggttggatgagcaaactcaaagagacccttttcttggttattgagggcataaatcccttccgttgcgatcgcatctcccttgctattgaccaaggtcaaggtatgggatcctgctgccaaatccggtgtttcataaaccttttggctgcgtttgcggcttgggctttgggtattgacggtcgctagctttcggccatcgacatagacatccatttccccatgaccagggtcgacagttgcgacgatataggctttggtgccttcaaactgataagtcactgaagctcccttttccttggtccacatagaggtgcctcggatgccttctccctcttcattccattggccattggcccgctcagctgtccggtcggaatgataagtcaaaccaagcggatagccatcggtttcttcaatgctggctggcgtcttatagacagagactccgttcaagattggagtagcttgggcatcggtgatggacacccggatatagcgactatcaactggttgccctttgatcaaacggcggtatcctacggttgaaccagctccaaaaggaacccattgcccattcaccgccacatcaatggtgaagccagaaatccgttggcctttctcgatggtttctttgagctctaccacatcaaaatgctgttcttttccaagatcgaggacaaaagatccggtcttggcatcatctgcaggggcccaactggtcttttcatcgccatctgtcaaatggctggccttgtagagagaattgcgtcgtgtcgagtcagcttctaccaaagctcctgccgcatagttcacactgtagagttggtccaaggtctgacggaattctttcaaacgggccacatcggcatccgcaaattttccgtcttgattgggtggaatattgagcagaagcggggttccacggccgaccgatttgaagtaaatgtccatcaattcgcgcaaggacttaggctcttgattgtcatggtagaaccagccggagcgaatagagacatcggcttctcccactgagtattgcttcccttccggatccccgtgattgaggtagctattggatggattgttgcggatcttatctggattgaccttctgccaaaccggatctccggcaatccccttttcatttccaatccaacgaacattggtcggctcagctgagaagatagcaatatccccttgggccttgcgaatggcttcaaaccacttgtcaaaggtataggtgactttttgagccccatcgccacgcgctccatccatccagacttctacgaacttacccttgttcccatattttggatcttcaaggatttccttaagctggttgagatagtattcattgtattggtcctctgtatccacatggtagagcgggctgtgggcatcccaaggagagagatagacccccatgtccatatcatacttgctggcagaagcagaaacctcggctaggatatcgccttttccttccttccaaccacttttggcaatggtatggtcggtgtatttggaagggtacaagaggaagccatcgtggtgcttgacgaccatgatcgtccgtttaaagccagcatctttcagggttttgatccactgatcggtatccagatgctctggatagaaataataaggatcttcttgtccatctccccactcacgatcgtagtaagtattcatcccaaagtggatgaaagctgctagttcttcgcggtggtattgcatctgagccttgcttggaagtggtccgtaatccgcaatctcagtctcctcatctagagaagtggctggttgagtggcttctgtcccttgactggctgtgcgattttctttctcactagtagctgctgagggctgttctgattgttcttggtgctcgttcacagttttctcctcctttccttgatctcctgcattgcttgtttcaacccgttcttcgcgagtttcactcctctcagcttgttcctctgcgtaactggtagtagttcctaaaaaacaagtcgctacgactaccgagcagacacctactgagagtttacgaatgccaaatcgatttctctgatcaactaatctttttcccatattccattcctttatgtcaccaggtaaagagggcggggcttccccatcctccttctttttacctgtgaacttttcaccgttttttactagtttctctagctgttttacttggcctttttggctctttttttctgatcgtccagcacagcactggcaaggcctgccgctaggattccagcaacgaggcttgcgacgctttcttccgttcctgtatttggtaatctaccttcggaaactggagcagctgaaactgctggtgtttgagctgttttctcgacttccttccctgctgcatctgtcccttcctgacgcactgctttaacctcaagagatgcttgaggagttgaggtagctactggtccttctgagccatgaggacgttctgggttcggaagcggttgtggctgtggttgcggttgtggctgcggttgtggctgtggttgcggttgtggctgtggttctggttgtggttctggctgtggctctggctgaggttgtggttgtggctgcggttgtggagtgtctggaagcacttctttcgtgcccacctccgtgatttctgccactggatctagctctacaaaggcatccagttccttccggctttccacaccattttcttgagagacttccaccaagcgcaatttgcggcctttttgaccttcttgaatcacacgtttctcaccttttggaagatccgcatttggacgttctaagcgctcaaagtccgtctcttctggctcaatcaccaactctggcttggtatggaccagattcttaaccccttcttcaggaatggctgagcctgtaggtgcttttgcggagagagaaagttgatatactttttcgagcttgccatcttctgagacaaccttgacaagaaccggagcattggcacttttagcatcgatgaccgtaacggctgttccattcttgccttgtgctgaaacgattggacgttctccctcatactctagatgataatctgtcacatctggtttaaaaccttctaagtctttgccattcacttggatcgtgacatcagttgttgcctgggcctcttctgttggggcataggcgctcaattcaatgattccaattccttttagattttcatcacggaccattcttaaacggatggctttggttctggtttcgttgaagctgaggttagagatatagccagcttcaaaggcataatccaagctataagggatttcctcccagttggaagcttggttaaatggatgatctggaagattcttcagattgccataatcatccggaacctcaaagtctggaccaatatagcgttcaagaaccgttttcgttggcaggcctgtttcctgatctgcaaagaagtcgaccgctactttattgaccaaacgctctgttacttgaccatttttcttgaagatgagaccagcaaacacttctgtttgatccggttctctcttccagttggtccagcgatagtattcgttgtagccaccatcgttgatgtaatcgatatagtcgatttgatttggatcgagatcattggtttcactagcaaatgctcttgtatcttctccattgtagtcacggttcacagagaggttttctcctgtcttttctgacacccggacggtcagctgagctgtcagatcatagccaatgacttttcctttcagcgtgaagctaccttcgtgagaaagtgcatcagctggtacagcctgccagtccaccgtaagttccttgcgttcatagcctgtatccccttggaagtaaacgcctacggtagatggtagaactagatcttgaccgactttcacaaaacggctgcctgcttccactgctactggagcagcttgtttcagtttttctgcatcgcttgtgagatggaggcggtattcttgtaagatagtaccatcttctgctttgtggatgacacggattggctcaccttcatggacacttggcacaaccgttgcaagaccgtgatggctagctgtcgcttccacttgtggataagcccgatcacgcgcatcgatgtagtaatcggtcacacttgggttgatacctggcaatacatcgccattgacgcgaatggtcaactggctcttctcttctgccgcaaccttattggcaaagatctgaatctctgaaatagagcttccacgcttgccttctggcgtcttcatacggatacgaacagcataggtgtcgactttatcaaaactgaaatgattcatcttaccagctgctaccggttcttcaacggttaggtggctgacttctttccagttagctggattgttaaatggatggtctgtttcgtctttgacacgatttggattgcttggaactgttgggatttgttcccctgtatagtactcaatcacatactcacttggagctccaacgccgtggtcttcgtggaaaccaacatggaggttgtccactgctcgcttggtcaagataccagaatccccaaacaagataccgacagaatcttccgcattgttacgtccccagttggtccaacggttggctggagcatcggtaaaggagatgaccttgtcattaaccttagcaactggatctgcatcattggagtcacttgcaaaagcgagtggcaagacagatcctgtccattgctctgctacgttggcccccttgactgtgtttgcggaaacacgaatatgaagacgtgttggaagatccgttccttctacacgaccggctaggacaacttctccttcttgggccaagagttgcggatcgaccgcatcccaggccaccttggcagcataggtcttgccattggagtgataagtccgcacgctttctggaagggctggtttttcaccgactggcgttgtcgtgctgacttcttctacagcgataatgccttcaacggtgacttgagcttgggcttctttttccacaccctctacatgacctgtgactgtaaagctatggtaatccttgacttgatctgcggttacagcatcccaggtcacacgtttttctttcgggaatcccttatcatactcgaccaagacggtctctggaagagctggcaaaacgtttcgatcggtgctgatccgtacaggacgcaccttgacaactgtcttttcttctggatttggcgtgatggtaaaggttaattcccctgtttttccttggaagctagcttgtaaatgaaccaatcctgcttctcgcaattccaaacctttattggttgcgacggcttttccttgacttcccgctgctgttgccacatcgatttgatctgctttgagacttgcctggctaccatcttggtaatgagcaatgacttcaagtggtactgtttggtcttccttgagttcttgcccttctggcagacgcaattctaggcgctggatctgtggactttcttcttggaattggaccacataggtctggacagctcccgtatccttagcggtaacatagatttgagctttcaaaccattttcacggctagcttgtaggaccgtcacttgggcattttctgcactagctgtgacttgacctggctcttgaccataagcgagggaacggaaaatggtatggttgccactaccaaattttggaagagctactccatctagctgaaccgttggtttcttagccttggctacatctcctcctgcaaccactagcgtcgcttggacggtttccccattgcttaggagtcctgtcgctttcaagcgagcacctggtgtggataattgctcctcttgaccagtttccaaggtccattgatcaacttcatagctaactgttcggccatctgtgaagaccaattgcacagtcttatccactgtcgctagatctgctccctgtgggatttgtttgatgactggaaggacttgttccacgccgatcacatcgaccagagcttcgaccgtgcgtccttgaacatgacctgtcacacggacttggccagcacggctatagtctgccgcatcccattcaacggcttcttcttgggccttgccatcgctatagaccacattgaccttacttggcaaggttggctcttctcctagataagcactttgtcgaacaggttccacacctaatacagtgcgttctgcttggtccttcttacctgtaaagaggctgacttggtctgattgcaagcgatctgagtctgcatacagagtaaaggcacccgcctgctcagttgatttgacaatcacaacccctttgccgttgaaggctttgcgttgccatgagccatcttcctgcgctttgtagcgttcacggctggcttgttccccattatcgacaccgacaatttggccttgtccatgcaaatggaaatgcaccaaattattggcagttgggaccacacgacctgcttcatcgacgatttcataggtaatataggtcaaatccttgccgtctgccgcaatcgcgtgttcttctttcaacaaacggacacccgcaggcttgccggctgtttcgacttgatctttcgcgatcacttcacccgcttcgttgcgcgcaatagcttccactttacctggtacataagggaccaaccactctagatagagttcatctggatttgccccttcttggtaggtccggccatcagctgtggtcttcttggtaaaagtcttcactccttgtgattccccattgacaatcaattccacactgtgggcattggagaaggtccgaacagggatccgtccttcttcatccatgacacgattggctaattctggattttcccagttccaatgtggcaagagatggaccattggatgtttctcggccgatacccattgactttggtaaaggtaaaaatcattctttggaaggccagcagtatcgacaataccaaaataagaacttttcacaggtgtgtcattttggttgtgccatggggttggctcaccgatatagtcggtacctgtccagataaattgccctgcatagccggcatgatcgcggtcaaaggtccaagaggcggttgctgtccgaccccaaccaacccggtcattgccgtagtctgattgttcatagtggcgatcttcttggttgctgccgacccattctctttcagggtggtagtaagaaccccgtgtccgcgttgcagaagaggtttcagaaccataaatgagccagtttggatgtttagctcgtagactttcatagttggcctctgaatagttgaagccaaccgcatcaagctctgctgctactttttcatggcctcctgaaccatcgccaaagcggaatttatcagctcccatagtgacatagcgggttgcatccacttccttgatagtcttgaccagacgacgaacggttgcgacagatttgtctgaaccatctgcttcaccgacttcgttaccgattgaccacatcacaatagaaggattgttcttgccccgctctaccatggtccgtagatcgtaatctgaccaagtatcccccttacgagcttctgggtgagtggcatccttttcaaagaaacgaccgtaatcgtattgtttcttgccaccataccaggtatcaaaggcttcttcttgaaccatcaagcccaactcagcagcaatttttaaggtttgttcactcgctgggttgtgggtcgtccgaatcgcattgactcccatgtccttcatctgtttgagacgacggtattcagccttgtaattttcctcagctccaagagccccgtggtcatggtgaagagataccccgtggaatttcgtcgccaccccattgaggaagaagccaccttctggcgtccagttgagatagcgataaccaaagcgttccttttgaacatctactaactgcgaatcccgataaacccgcgtatacaaggtatagagagctggatgatccgttttcacatcccagagggttggtttttcaacatggagggtttgagataggttgatctcttgacctgctagaacagcttgtgcttcactgcgcgttttttcgctcaccacttggccattttgatcgacaatttcatattccgcataaatactatgggcttgatcatcctggttgacaatgcggctcttcaccaccgtatctactgccccattttgctgtttttccaactgaggggtcgtaatcgtagtcccatactgcgctaaatgaaccttgtccgttacactcagcttaacatcccggtaaatcccactaccagaataccaacggctacttggttgttgattgaccacatgaacggcgatggtattctcgcttccatccgcatttaaataaggagtaatatcataagaaaaggcattgtagccatttggataatgaccgacgaattgtccgtttacatagactttggaatccatataaaccccgccaaattccaagcggaccttcttatctagatctttgtcgtccaaacggaaggtcttacggtaccaagcatccccaccgtttaattgacccccctcattttgagcaggagagttgtgatcgaaatcaaagaaaatagaccagtcatgaggaagatctaattttttccaatccttgacatccacttgacgcccttctgcaccaggagctgcatttaatttaaaataccaatctttattaaaatcacgttctcgatcttgcacaatatcctccgctacacgattttgatctggagcagcagtttcttccgttcctgtagcacgctcagatgaagtagaaacaggctggccctctccttgaggggctggcttttcctcagctctggtaggggtgatgacagctggagcttctgaaactcttgcaccagcttcaggaacttccgcttctgaattttccgtcacaacacttggtgtctcaatcgaagtcggttcactttcgagggctggcttttcttccgcatggacccttgaaagacccaaggcagaaatcccaatcacaacagaacaagctccaactgagagcttacgaatactaaaaacaggacgcttttcaaaaaaagactttcccataaaaacctcctcttaggattaacaatttaatttgtaagcgctttcttatacctgtgaacgcttacagaaaatcacatattaactataccaaaaaaagaggagcgataggcctcgatttcgctccaactatagttagattaagaattcctttaattagtggaaatcccctacgaggcaaaaaatagaagccaacggctcctattgagagcatagacaaactgttcttttttacaaatcttataaattctataatataaaaaaatttattcgttagaattattcaatcatctactgaaactttccgctgtgagaaaagtgcctgaaactattcagtttcaggcactcggaattattgagaccttaggctcaataattagtcatggaacttcgtagaagttcgctgacgtccgtactcacctaaggaacgtttctaagaagactttgtcttcagtctgaaatagaagccaacggcttctatttttttatgatcttataatcctggttcttgaccaagttcagcagccaccatccaaatgttcttttcaagttctgctttcgccccaacaaagatatcgttggttacatcgtcgccttcagcatcggtaacatccaaagctttttggtaaaggccatcaaggtaatggaagatttcaagaacacgtgtcaagctttcttctacatttttcgtaaatgttccacggcgttcttcaatattgctgtgttccaaaaattcagtcatgctagaatatggcgcaccaccaagagtgatcaagcgttcgctcacttcatccaaggttgcatccaagctgtccatgtattcgtccatttttggatgccagaccataaagccacgtccacgcatgtaccagtgtacttggtgaagggcaatgtgagcgacgtagagatctgctacgacttggttcaagagcgcttttgtctctggaagactttctttattagaaggtgcaaaagttgctacatcagtagctgcttcatgtttcatcattgtcatgttgttctcctttttataatgattctaattaattatgtctttattataatccttctaattaagaaagtcaagataaaagattcaaaaaaagataaatttaaaaaaagttggaatagttgtcaattgatagaagatacgatagaatgaagaagactaatcgaaaggcttttctaatgaaatacattcttacatttttgatctctatggttcctctcgtggaacttcgtggcgctgttcccttcgctatttcaagaggaattcccctctggcaggccctcaccattggggttattggcaatatgcttccgattcctataatcttcttctttgcccgtcatattctcgcttggggcgcagataaaccagtcatcggctccttcttcacctggtgtttgaacaagggccataagggcggacagaaactggaaaaagttgcaggtgacaagggaatcttctgggccttattgctctttgtgggaattcctcttccgggaactggtgcctggactggagcccttgcagcttccatccttgactgggacttcaaacgcagtagcctcgcagtcatgctcggagtgatactagccggcctcatcatgggaaccctgtccctgctcctaggaattgataccttcgcacattaagcaaaagactgaagcaacggcttcagtttttgcatacaaaaaagaggcttccgttcctctaagagtatagacaaactgttttttttaaaatctaataaattctataaaacaaaaaaatttatttattagaattactcagtcatctactaaaactttccgctgtgagaaaagtgctagaaacaagcatgtttctagcactcgggagttttggaaccttaggtccaaaactaagtcatggaacttctttgaagttcgctgacgtccgtactcacctaaggaaagttatttagatgaatttatcttacaaaaaagaggtttccttcgaaacctcttatttttttattcttagttgttaagagctgctgccattgtagctgcaacttctgcttcaaagtcatttgaagctttttcaataccctcaccaacttcaaaacgaacgaattcgataactgaagcatttactgattcaaggtaagcttcaactgtcttgctgtcatccatgatgtaaacttgtgcaaggagagtgtaggcttggtcaacttttgtgttgtccaagaagaagcgatccattttacctgggatgattttatcccagattttttctggtttaccttcagctgccaattcagctttgatatcttcttcagcttgagcaaccacttcgtcagtcaattgtgctttagaaccaaatttcaagtgtggaagagctggtttaccaaccattgcacggctttcgttatcttggtcgatgacgtggttcaattgtgccaattcatctttcacgaattgttcatccaattctttgtatgaaagaacagttggtttcattgcagcgatgtgcattgagatttgtttagcaagtgcttcgtctccaccttcgattacagagataacaccgatacgtccaccattatgttggtaagcaccgaagtgttgtgcatctgttttttcaagcaaggcaaaacgacggaatgaaattttttcaccgattgtagctgttgcagatacgtatgcagcttcaagagtttcacctgaaggcattgtcaaagcaagagcttcttcgttgttagctggtttaccttcagcgatgacttttgctgttgcgtttaccaattcaacgaattgagcgtttttcgcaacgaagtcagtttcagcgtttacttcaactactgctgcaacgttaccattgacataaacaccagtcaaaccttcagcggcaacacggtcagctttcttagctgctttagccatacctttttcgcgaagcaattcgatcgctttttcgatatcaccttcaacttcaaccaatgcctttttagcgtccatgacaccggcaccagatttttcacgcaattcttttacaagcttagctgtaatttctgccatttttgttctcctatatttttaataaaataagagggtcgggctgagccctgccctcttaggttcgttacttattgaatgaaattaagcgttgtcgccttctacaacttcaacgatttcttcgattgaatcagcttgaccttcagtagctgccaattcagcttctactgtagcaacactgtcttcaccttgacgtccttcgataacagcgtcagccattttcgcagtgatcaatttaacagcgcggatagcgtcatcgttcgctgggatgataacatcgatatcatctgggtcagtgtttgtgtcgaccatcgctacaactgggatacccaatttcttagcttctttaacagcgatttgttctttatgtggatccacaacgtacattacgtctgggatacgaggcatgtcttcgataccgcccaagaatttttcaagacgagcgcgttgtttgttcaacaatgcaacttctttcttaggaagaacttcaaaagttccatcttcttccatgcgtttgatttctttcaaacgagcgatacgtttttggattgttccccagttagtaagagttccacccaaccaacggtggttgatgaagtattgacctgcacgaacagcttcttctgcaacagcatcagcagcttgtttcttagtacctacgaacaagataactgcatcgtttgcagctgcatcacgcatgaagtcgtatgcttggtctgcatattttacagtttgttgcaagtcgataacgtggattccgttacgttctgtgaagatgtacttagccatcttagggttccagcgacgagtttggtgaccgaagtgtacaccagcctcaagaagttgtttcattgaaattactgccatgagtagtttctccttttttgtttttttctcctctctcagacgtcaacttgcagcacgaccacaagggcaacggtgccacaatggatccgagatgagtatttgctgtcttagacaactctataagtatagcagaaatcactagaattcgcaagctatttgagagattttttcaatccctacgatgaaatggttttctaaagttgtttgacgtaaaaagtttttcttgacctatctttatttttaggttacaatattatatgttatggcggtatagccaagtggtaaggcacggctctgcaaaagcttgatcgtcggttcaaatccgtctaccgccttgataataaaattttttatcatcttttatcttttaaaaattcccctagcaatagggggtttttttgttgccatttgctccattccttgattattgatataataaaacctcgcctgatcggcgaagcacattagaaagggtatttatgaaaaacattcgtttctttacgatcggtcttctttcactagtgacactagccgcttgctcacctgccaattctgcgcaatcagcaaaaaccgcttctagctctagaaaaccgatcaaacaatcttctaccaaaacatcatctagtaaatcgtcgaccacttcttcagacagcagtagctcagatgatttttcaggtcgcttcagcttggatccagatgatggcgcatctctccaatatgtgccaggagctgcatccattcctgagatcgaaaagctcaagaacctccaccctaccaccggttttgtattaagaaccgaagatggacaagaggttggtgggccaaaagaaagaaacagttacgatgacgtagtagcagcctttggtcaacccgtaagtagtacagacagtgcgaatcctggcgatggggtcaatgtttgggcaacagacaatggcgatatcatggctttcttccgcaataatgtgttaacagatatcaccttccgactaagagggggcgatgccaaccaccagtctactggcagcatttccaaatccgatacaccaaaaacggccctcgaacgtctcggaaaaccctatgccattatgcgttcagaaaatgggaccagctatgtctataaagatagcaacggagatgaatctagcttctctacacaaggaaataagatcttcaatgttacgtctactgcagaaaccaagcagttaaaaaagatcactggcctggataaaaatcaataataagcaatcaaaagaggctgggacaaaagtcctagcctctcaattatttttggattgtcgagcaagacgcagtggttgagtgggctctactacgctgatttcatcagcttttacagccctactcaactgtgcggaggtgggacgacgaaatcgaattctaacgaattaccgatttctgtcccactctctctttcttacaattcagcaatttggttcaaattcacttctgcaaccgtatcgttaccgaacatagaaatgaccattttcaccttgttgttatcaatttcagtgatcttaccagtatagtctgtgaaggcaccgtcgatgatacgaaccgtatcgcccaccttgacatccaaatcaaactcttgaacagtttgacccatagagagcaagatgctgcggatttcttcttccaacaatggagttggttttgaacggttcccgtgtgatccgacgaaaccagtaacgttcggtgtattccgaacgacaaaccaagcttcatctgtcatgaccatttctaccaagacataacctgggaagcggttttcttcgatttcttttgttttaccgtttttctcaacttgtacggtttgagttggaatctctacacgcaagatgttttctaacatattgtaagtttgcgcacgttgcaaaagattctcttttaccttgttttcatatcctgagtaggtttgtagtacaaaccagcctttatcaaaactgtccatttgggcatcctttctttctgtttagcctgctcgagcttttgtgaacatactaaaaaaagcctcttggctttccttttcctagcttcattataccacattttgcaggaatgcaaagaggtttgctgatttatttttaagaaaagactacaaaaagtgggaccctggggatcccacctggcttcttttcttaaaagaaattgatcatgtgcaataggccacgtgcaatgactttgtcaaacaaataaatcaatgcaacaaagaaagcggtgtactcaatcactgagataaagtttttccatctttccttgcgatttggccaagttgtatcttttagtaagacgaaaatatctttaatgaatttcacaactctctcctatcgtgtttctttatggatggtatacttgctgcaatgcttgcagaatttattgacttctagacgtgttggttttggcgtcccactcaacttaatggagtaattgcgtgacccacaaaccgtacacgctagacttgctttttttaatgccataacgcctccgttcaccccattatagcaagttttccacgttttgacaagaacagaaaatctcctgtcaagaaaaaagcaaatctaaagcgttatcactctggtttttgcctcatttttggtaaaataaaacaaaaggagacgaatatgaaaagtgataacctaaaagaaagtagaaatatcgaagaccgtcgagggcaaagctactctcagtcttcaggcaatagtaatcttggcggaggcattttacagatcttactatcgccggggagcttcaaaagcaagatcgtcctcatccttcttctggttcttctaggaggtggtggcgctagtcttgggggtctctttggaaatgggacttcttctcaaccttaccaatccacccaagtcacgcgcaccaacaagacccatgtcgacgatgcagatgccgagttcgtcagcaaggtccttgccacaacagaagatcattggcacaaggtctttcaagctgaaggacgtacttaccatgagcccaaactagtcttctataccggacggacacagacaggctgtggggttgggcaagcatcggctggtcctttctactgtccaaccgacaaaaagatttatttggatatgagcttctacaaggaattaacaaccaaatacaaggctagcggggacttcgccatggcctacgtgatcgctcacgaagtcggccaccacgtgcaaaatgagctgggaatccttggtaaataccatcggatgcaacaaggtctttctgaaaaggaacgaaatgccatcagtgtccgcattgagctacaagctgattatctagccggtgtctgggcccgctccattcaagaccgaaaccttctagatatcggcgatatcgaagaagccatgaatgcggctcatgcagttggtgatgatactctccaggagcaagcctacggctactcggtaccagatagctttacccacgggacttcggaacaacgcatgcgctggttcaaacgaggctaccagtacggggatcttcaacacggcgatacctttagcttgtcagatagcgaactctaaacaaaggtctattcagaaatccttctgaatggatctttttagaatatagacaaattgcattttacataaaacaatctaagtaacgttgaaaaattaaaataattaatactattaggatcatttcaacagaaactttccgccgtgagaaaagtgccagaaacactgttgtttctagcactcgggagttttgagacctcaggctcaaaactaagtcatggaacttcttcgaagttcgctgacgtccgtactcacttaaggaaagtttctaagaagactttgtcttcaatctgcaaaaaacgattcagaaattcttctgaatcgtttttttgattagaaaccaagccagcccttgaaggtatcccaggcgtttttcgcttttcctggaatatcggcctcgtcgattgcttttttcgcatcatcgaccatattcgacgccttttctttgacatcctcaaagaaacctttgtcttctttgctatctgtttctgtcgtttcttctccgactggcgcaatgccgttttcagcataagagttcttcaccgagtcaaactgggtaccgtctgtataaggcaggacactgttggcaacattgcggaagatctcggacgccgttccagcactactgtccgtcaggtagtgattttcatcggtcgttgggaaaccaagccactgactgatgaccacatctggcgtgtagccgatcacccattggtctccagagaggtccttgttaaagctggtctctgtcgtaccggttttccctgccatggtatagccataaggcgcagcgttcacccctgtaccattactgaaggtaccaagcatcatattggtcatcttatctgtcgttgaaccactaagcactcgggttgatttctggctgtggctcttgaccacttgaccactggcattttcgatcttggtaataagatgggcatcattcatgaccccgccgtttgcaaaggtgccataagcctgagccatctgcatcggattggttgtcacaccagctcccaaggcaacggcaagcgacttgtccaccttgtccatgttgagcccgaattttttcccgtattcaaagaccgtatcgagacccaaatcattagcggtcgctacggctggaaggttaagggactctgccaaggcctggtacatcggtaccgttgggctagactggattcccgcatagttattgacctcatagcttccatattgggtggtactattgtccaactccttattggtcgaccaaccttcagcaacagctgggctatagacgactaaaggtttgatggttgatcctggactacgggcagcctgggtcgcatagttatagctacggaaacctggattttgatcgcttccgacacgccctacgagggcccgaacccctccggtcttaggatcaagcgccacactaccagattccgcgcgcgtgccgtcttccgctactgggaagagggccgtattgtcatagatcacctgcatgcttgcttggtaattttgatccagctctgtgtagatccggtaaccatttttgacaatgtcttcttcggtcaggccgtattcattgaccgcttcattgatgaccgcatcaaaataggatgggtagcggtagtcctctgacttgccttcataggcatcgaccagctggccatggatatccacagccgcggactgatcagctgttttctggtcaatataaccagccgccaccatattttggaggaccgtattgcggcgattggtcgcattctctactgaatagagcgggttatagatctcaggtcccttgagcataccggcgagtactgcagactgatccaggcttaattgactggctgaaaccccaaaatacttcttggaagcatcctcaattccccaaaccccgtttccaaaataggcattgttgaggtacatggtgaggatttcttttttactgtatttcttattgatttcaagcgccaggaagaattccttggccttgcgctccaccgtctggtcctgagacaggtaagcattcttggctagctgctgggtgatggtcgacccaccacctgagcgacccagggtcaaaatcgctaagaagaagcgaccatagttgatcccgctattcttgtaaaagctccggtcttctgttgcgaccacggcattttgcagattctcactaatggcatcgagttcgacataggttcctttttgcccggtcaaacttcccgcctggtccccattcttatcatagataatggtggtcgccttcagtgcattctgcaaatccttgacgttggtcgtcttagcaaggtagaaaagatagccccctgtcaagaggctaaagcctagcccaatgatcaggagaatcttggtcaaatggaatctgcgccaaaaacgacggaaggggtgttgagagagaggcttgcttctatgcttgcctgagcgactataggtcggctctactgtctcttccggtagttctgtgtctggcacttcttctgccaccgctttgggcagatgatcctttctaaaaaaagtgatcaggttttcaaataattcttttattctattcatacctgttattgtaacaccttatccttgtcctagcaagaaaagatagctcctcgctatttctcatttagttttctttaagcttagattttgctacaatagggtcatgaactatcaatttaccattccacaatcctttccccagatgactgtgaaagagctccttgaagactacttcctcatcccccgtaagatccggcattttttacgagtcaaaaaacacgtcttggtgaatggagaaaccatcaactggcaaagccccgttcaaaaaggagaccagatccagctgatctttgacgtagacgattaccctgaaaaagagctcctagaaggagaccccagtctcgtcgaagaactctatcaggatgagcacgtcatcatcgtcaataagcctgaaggcatgaagacccatgccaatgaaccgacggaaatcgctcttctcaaccatgtttccagctatgttggatccacctgttacgtcgtgcaccggttagataaggaaaccagcggagcgattttatttgccaagaatccttttatcctgcctattctcaaccgaattttggaagataaaaaaatccaacgcgagtactgggccttgattcaaggtagcttgacgcaaaaaacgatggtcttcaaggataaaatcggacgtgatcgccacgatcggcgcaagcgcctggtcgatccacgcaaaggtcagtacgcagaaacccaggtgacgcaactgaaaaaaatcgggcgaaacagcctggtcaaatgccagctcaagacggggcgtacccatcagatccgggtgcatctctcccatcatgggcacccgattgtcggggatcctctctataaccctgaacgcggagagcgactcatgctccatgcccatcgcttgaccttcaccaatccattaacgcttgaaaccatccaagtcgaggccccttctaagagttttgaagaagggttgaaaaaatgagaaaagaaccgaaatagtcttcttagagactttccttaagtgagtacggacgtcagcgaacttcaaagaagttccatgacttagttttgagccccttcgctctttaatttctaggctcaggctaaaacagtttcccaaactgttttactctcaaaactcccgagtgcttgaaattctaatatttcaagcacttttctcactgcgtaaagtctccagtcataatcgaatatttcaaaagataaaaatcattttaaacaattgacagaatctctcattttattttaaaaacttatctgcattcaaaaaagaagccacaaaaagaggctggacaaaaactgttcagcctttttatatttgatagaaataactgtatgacgcagtggttgattggcatctttgttcgctttttaagctccaaagatgacctaatcaactgtgcgggggtgggaagacgaactctttttactagtcggagttctttcccactccctttttattattgatagcgtggggttgcaaatccacggatattgccatgtccgattcggtaggtattgcgacggacttggttgttggagtttccttcaatggtatgaatgattccgtttgagacgctttcgacaattccgatgtgatccgcaaagccattgttttgttggctattttgatcccagttaaaggtgatgatgtcccctgcttttggtgtagtggtaccatcttcattccagatgcccaagcgtttgaagatctggatgtgacgttcgactccacattcacggccaatcaaaccgctcaaaccttcccgctggaagactgttgtgacaaagatatcacaccagtcatcggtcgtcttcactgcataaccaactggaagtggtttgacactgttataatcattgaccaattgttggtgagctgcagttccgccacgaacgcctactagactagctgctgcccgtaagacacggtcccgttgtccattcgttacacgaggactaaaagcagtttgatctactgtcgcacggggatgaagggctgtttgaccaaggttaaagccttcaacgccaccatcgacataatccacatagacgtgagtggtatagttacctgattggtactggtgattggctgcagagacctgcacttctgtatgcattccagaaggtgctgttgaataccagaaaagattttcttggtgcgcttgagaccaggctgcgacacggatgttcttaatccgacgtccctgaggcgcttgatccactgttaccgtataggttccagcaccagaattgacattcttaatagaagcttgcgtcttagtcatggcatttcggaactccacttctgtagtcgtggtaccaacacctacacgagaaccatcattttggatatagtagaggtggatatggtacttaccagtagagttcttgtgatcgctcgctttgaccgataccttgtagtctccatttgattggcgagtcgcttcataccagcgaatatcatcttggccgtccttatcagaccaagtagggacttgaacggtccgcacacctttaggattgtagacatccttgatgatgacgtcaaaggtacccgcatccttgttgttgttttggattaggatcgtgccagagcggcgggcttgacgcacttctgtcgtagtttctgtaatatagcttcgttggttattttgatctacatagtagacatggacattgtacttcccatcctcatttttatgatcgcttgccttaatcgttgcacggtagctgccgtcactttgacggactgctttgtgccatactagatcatcttgccagttcttgtctgaccaggttggaatcaagacttccttcaagccatttggtgcaacaacattacgaataactgcatcaaatgtgcctgtttcagaattattgttctcaatggtgacagtgccacttggtttaacgtggtgtacttctgtagtggtttctgtgatgtagtttcgttgattattttgatctacataataaacatggacattgtatttaccatcttcatttttatggtctgaggctttgatagttgcacggtaacttccatcactttgacggactgctttgtgccatactagatcatcttgccagttcttgtctgaccatgttgggatcaagacttcttttaatccgtttggagctactacattacgaattactgcatcaaaggtacccgtctcaacattattattttcaattgttaaagtaccacttggttttacgtggtgtacttctgtagtggtttctgtgatgtagtttcgtttgtctgcttgatccacatagtagacgtggacatggtacttaccatcttcatttttatgatcgcctgctttaatagttgcacggtagcttccatcactttgaaggactgctttgtgccatactagatcatcttgccagttcttgtctgaccaggttgggatcaagacttctttcaagccatttggagctaccacattgcgaataactgcatcaaaggtacccgtctcaacattattattttcaatcgtcaacgtgccacttggttttacgtggtgtacttctgttgtagtctctgtgatgtaatttcgtttgtcagcttgatctacataataaacatggacattgtatttaccatcttcatttttatgatctgaggctttgatagttgctcggtagctgccgtcactttgacgaaccgctttgtgccatactagatcatcttgccagttcttatctgaccaggttgggatcaagacttccttcaagccatttggagctactacattgcgaataactgcatcaaaggttcctgtttcaacattattattttcaattgttagcgtgccacttggtttctctactttctcaaccggcaaactattatcttctgattctaccactcgtgcgcgtgcgccatatggtgcgcgactaactaccacagttggtgctggtttctctgatgcaaccttgtcgctagtgcccttgtcagaagactggttattgctaagagtcggtgtggcaggtgttgcctctgttgcaacggtattttctgtctgaatacctttctcaactcccactccttcgcttacagtattctgcgcttctgatgaagttgttgttgcaacgacagctgatgtattttctggtgtttgatcggacgcatgttgctcatcggctttgacttgttgtgtcgaaaaagctaacaaaacggctgtcccagcataaaaaataagatctttctttttcatgtatcttcccttacaattttttatacggattgtacccacatagtagtattatagcacaaaccgccagatcaagaaacaatatcatgagaagaatcctatttttaaagaaaaaaagaaggccagattggccttctgattagcttatgcaaaaattgagaagaaaggtgctccaagcttattatccatcggatctttactcttaatggagtgaagatagttaatggagtaccagccgttgttgccactattataaggatcgcgaacataggttcttccattgtcataaccatgcaagaccaattcatgagtataaggatcgctagtgaattggctattgcctaccgcagcaagtacatgcttgccagccatgagagcttctgcaatgcctccagctccattaatcaattggctcttcaagccccagttacgagtggcagctacaatcccatcagaatctgttcctgcttcacctttgttgaatgaatcagtattgttgtagagataatcagctactgttgttggcaaaatagttctacctaggatatctgtaaaggtcatagcaagggaggttggcacacaacctgactgatcgacattgctcacaccgtaatatttcccagcccaacgaggatcccgttgagaataataggttgtttgtggattcaccttttgatttcgtggagacaaggctgtctgaccgaggttaaaaccttcaactcccccatctttgtagtctacatagacgtgagtggtgtagttgcccgcttcattaccgtggttattggcagagacagtgatctctgtatgcatacctgtcggtgttgcggaataccagtatagattttcttggtgcgctttagaccaagctgcgacacgaatattcttaatctgacgtccctgaggtgcctgatctacagctactgtataagtcccgttcgttgcattgacattcttgatagcagcttgcgtcttggtctgggcatttcggaattcaacttctgtagtcgtggtaccaacacctacacgagaaccatcattttgaatgtaataaaggtgaatatggtatttaccagtagagttcttatgatcgctcgctttgaccgataccttgtagtctccgtttgcttgacgagtcgcttcgtaccagcggagatcatcctgtccatccttatccgaccatgtaggaacttgaacagtccgcacacctttaggactgtatacatccttgataatgacgtcaaaggtacctgtatccttgttgttgttttggatcaagattgtaccagaacggcgggcttgacgcacttctgtcgtggtttctgtaatgtagttccgttggttattttgatctacataataaacatggacattgtatttaccatcttcatttttatggtctgaagctttgatagttgcacggtaacttccatcactttgaaggactgctttatgccatactagatcatcttgccagttcttgtcggaccatgttgggatcaagacttcttttaatccgtttggagctactacattacgaattactgcatcaaacgtgcccgtctcaacattattattttcaatcgtcaacgtgccacttggttttacgtggtgtacttctgttgtagtctctgtgatgtagtttcgtttgtcagattgatccacatagtagacatggacgttgtacttaccgtcatcatttttatggtctgaggctttgatagtcgcacggtagcttccatcactttgacgaactgctttatgccagactagatcatcttgccagttcttgtctgaccaggttgggatcaagacttccttcaatccgtttggagctactacattgcgaataactgcatcaaacgtgcccgtctcaacattattattttcaatcgttaacgtgccacttggttttacgtggtgtacttctgtcgcagtctttgtgatgtatgtcgtggtttctgttatgtagttccgttgattattttgatctacatagtagacatggacgttgtacttaccatcttcatttttatgatctgaggctttgatggtagctcggtagcttccgtcactttgacgaactgctttgtgccatactagatcatcttgccagttcttgtctgaccaggttggtatcaaaacttctttcaagccatttggagctactacattgcgaataactgcatcaaaggttcctgcctctgaattattattctcaatggtgacagtgccacttggtttaacgtggtgtacttctgttgtagtctctgtgatgtaatttcgtttgtcagcttgatctacataataaacatggacattgtatttaccatcttcatttttatgatctgaggctttgatagttgctcggtagctgccgtcactttgacgaaccgctttatgccatactagatcatcctgccagttcttgtctgaccaagttggaaccaagacttctttcaagccatttggagctactacattgcgaataactgcatcaaaggttcctgtttcagcattattattctcaatcgttagcgtgccacttggttttaaatcctctggtcgttttccgatgtaaacatttgtcgttgttccacccacacccgtcatttgtccattgttctgaacatagtaaaggtgaacattataaagaccggttgagtttttatgatcggacgcttttacattaacagtataggttccgtttgcttgacggttggctgtataccaaacaaggtcatcttgaccacctgtttctgaccagatcggtacagaaacacttcgaactccatttggtgccttaacatttgagatgacaacgtcaaagcggcccgtcatagtatcgttattgacaatgtcaatcttcccacttaagctgccttctgttggatccgctgcaggttttgcgttcgctgtaaagcgaccggtatagtccacactgtggtcaaagaggtgttttcctggaagcaattccgcttgagaagtaaactgccacgcgccagctttcccattgtaacgcaagcttttcgcatcgtttacagacagttttggagaagggtattgagcaacccagaaattctgaagcccaaattgagcggtgttaacaggacctttcttgcgaaggttgttttcatccaaccagctagcactggtgtagaacatcaagttggtgtagccatttttgcgcatttcgtcagcccaagcttgggtgttgcggttaatgtttggctgcatcttggcatcctcaaagtcattgaccatgagggtattctttggcaaactcaaacgttgtgcagctgcaatgtagaatcgcgcttctgcacgcgctgcttcctcagaagtatagcgtgagaagtggtaggtcgatacttgcagacccgcagcttgtgcattacgaatttggttctccgcattcgggttcttgtaccaagtgtcttctgtcaatttgacaacgacaccgcccacgcctttattagctagggtacggtagtctccaatactaatgtctccgttatggctactcacatcaacgaatgattttggctgaaccgccacatctgttgaacgaccagctggagcgtgagcgcctgtgttaaagaaggtcgtgcttcctgtattagacggaagaggagtttcttctttctcagtcgtcgatgcttctgtagctttctctacagatggaaccccactttctgaagccgcggccttgttcacaggtgctacaggctgttcggtcacatttgctggtgctgcatagttgcttgcgacaggtgctaccgacttttcagcaacggctacttctggcgctttttcagcttggacttggttgccttcagtagtagcggcctcgtttgaaaccagctcatctgcactgactccctgagcagatacagccatcaagactgccgctccggcataaaaaataagatctttctttttcatataaacttccctttatacaaattttatacgttaatcattttaccacacggtttcagcgatgaaaagttttataaggcaaatttttaaaattagtgatatttttttgaaaaactaaaaaaagaagtctgtctgacttcttttgctattaaactatttttcatatcccaaataaattatttactacaatcggtagttgtcaaaaatttaattagaaaaagaattatacctgatctaaatcctgtttcatcactgaaatcattctttttgcaactgtgtcccacgaatattctgctttataataatcttgtttcatctgaacatttctaaagaagctttcatcttttattagattatacattttatcagctaaaacccgtgggttttcctcttcagcaggtattaataatcctgtttcattattttgaattagatttggcatttccattaaattacgtccaatacatggtaaaccatagcaaagagcttcaacaaacacaattccaaatgcttcaaatcgagaaggtaaaacaaatacatcacaaagattataataatattgcaccttatcagctggtagattccctaaaaaataaacattcggattgttaaattccatcggtgcatctgagggacctataatgtacaactctgcctctggcatgagattattttgcaaataaacaaaagcattataaacaagatttccacctttacgcaaaaaatctttgccaataaataaaaatttatttcgtcccttatgtgagtgctcaagtaataggttgtccatatttgttcccgctcccacgtaatgaactttttcaactggaagcccttgttgagctattaggtaatctgaaaaccatttactcatagtaaatattccagtggcttgattataaaatgtttcctgttttctcattcgactatctagaatatctgccgagacgttttgaaaaccactatatttgaatgattgactattgttttgagaactctctatcaaataatgaagattcaagtcttgatagatatacactggattatcaggaaaagataaaggaaactcatcaaatgtaagacaaacatcctttggagagagatgaacttgattttcagcatattttatatacgtcatgttcatatcagattttctaatacctaaacgaacaagcactttgtgcacattcattctaaaagtataaaaaatattctgttcctcaacaatctcgtattttcctaaatactttttaatattagttattgtaccagaccaatcccaggtcaattgttctttgttatgaataattcttggaattacaatcttcaaactaacccctcctaaatttatgtttagctatatctaaaatatgatctaacaatggattttttaaaagtttgagctctaataaatagatgattaagcttactaaagtaatgctaaaaattaaaagaagtgaattagttacgaataacttaaacccaaaaccaatgactattattgaaaagaaacctagtaaagcttgaactaagttctgtctccatagtacaaaattaatgtacttcccgctttctcttacaaccagaaagttatataaaacaataaaaaattctgatgcaatcgttgctactgcagcaccattctgataaaatactggaattaaaagaagactaattccgatatttacaacaattccatatagagctcctgttaagtttacagtttcacgtccgataggtatattaagcccataagttaatatcccaccaaatatggctccaattaaactaattgctagtaactgtaatgttaaagtggcatcgataaattttattccacctaaaaataaaataatttccctagataggacaataagacctgcactcattggaattaagattagagttaccactgaaagtatttgagtataactttttttaaattcgtcaattttctgttctccaaacaaatgtgacaacctaggtattgtaacagaatagattgaagctaataaattttttaatattgtatatactctggctgcaacagcatacaatccaacgtaatatgctcctttaaaccactctaatattagcatatcagaattagcatagatactaattactagaccaccagaaaacaagacaataattggcttaaaatgctttactagatcaagtctccaaacaagagagagttttaaatactttctacaatagattaaatttaaaatacaagatatccctgaaccaattactgagataaatgtatatagatataaatcactagctgttttaacaagaacaaacatcaatatcaacgataaaatttgtataatgatacttctaatcgtaatataaaggaaatcctcaaaaagaacgtttatccagtccactccgagtgttgtaaaaacaattgtcaaactttgaataaaaatcagaatttgatattctctattcggaataaataagcatacaactaatactaacaacagataggatactatcgtcgataaaatatttatagtaaaaatttgattacctaaatgacttaatttcttagaatcagatctaatacgccccccttccctaatagcataagtagagatcccaagtgcagcaactaaagaaaagtaacctacaatagaagctgtataattaatttttcctaggttctccacacctaatattctactgatatagggataagtgattaaagggaatataattgaaagtgctgttttaaataaatttaaagccgcattcactcccatttttttagtcatctattaactctccatctctgtttaattttgcagattcattattgataataactagtgtcaacgttaacgcaataatccgaggtctatcaatatatgacatgattggaaggctcatcagaaaactaatcagtaggcctgttattaatacgttggaactaagtttctttacccacgtcataattaaatttatagtcaaaaggatataccatacaaaccctggcacccccaaagaacctaatgttccaaatatcccgatatcatcataattaaaaaatccatcaggcccttttataaaataatataaagaagtgcccttttccggagtatgcaatcctaaaccaaatggataagtaaaaattttattaaaataatattctattgcacctgttcgagcaaaagaggagccggtgttatccgaaatactatcagatattgaaccaaatttatttgaaataatgaataaacccgccgtccctaaaataagagtccataataatgaggatagagttagtctacgcttattgtatatgaaatacattgaaagaatgactattagtacagtcaccaaatagtatctcgactgatcaacataaaaaatagcaactaacatcaataataaactaactatatcaaaaaatgattttttaaaatgatttgcaataattttccatgccaccaatataacaaatacccgaacaagtccctcaaaaacactataaatacgtaaaggtactgttaaattataaatataacttataggaataatctcttcaattttcaaaaacaatgtttgcaagccatgatatctgtatacttgcataacaaataatattgatactattgaaatggttatctgaccgattttaacaaaaagcttatagtttctttctgtcttaaatatctcgcaaagaggaaaataaaggagtaaaattgaataaggaagaacatcccacaatacttgcgtaatcgagtaatcaaataaatacattgacacaagcgaattaaaaaacagaattagaaaaaagattaggatataatttccaaaaatacctagtttaagtttccctttattatagataaagtatgccaaaaataatattaaagaatagaatgcaactcctaatttattactggccgctcctcccagtaaattcggccaacttactagataaaaacctctgaattcaatcaagaaaaatagtaaaaatagaaaaagatatttattaaatttcaatgttttttctccttgaaatacgtaccatccaatatttttttcaatcgatatatctttttacataagaagtaggacatatcagatattttcaaagaaagtttagatgcccctctatattctctgtaatagtatttttttgatacacggccaattttctctgactcaggattatgcgctcctctatgataatgataaattgtccattcaggatagaaataagtcatgtatcccttattcctcattctttcacttaaaatcatttcttcacaatagagaaaaatattttcatcaaatcctgatactgcttcaaaagcatttctagaaacaaacataaagctaccactaacccatccagtctcaccctcaggagcagtatagtcaatatcaatccatttatgtatcttactattaaaccactgcctattataatcctgaagtatcatctcttctacaaaattcatccgcttacgaggactttgaatatctccttgaggagtgagaatcttaggaccaactatacctattggatgatcgctcgtttcaatgatagttttacattcattcaactgtaaaccattaggaaactctaaatcattgtttgaaaaaactagatagcgtgtatcaaagttctgaattgcaaattttgcacctaaattattgcctttagagtatccaccattttcattggaatcaattatataaattttcctttgtgaaatttcaaaagaataaacttttttcccattaaaagcagaggaagtaaattcaactttagaatcttgtaagaattgtttccccaattcttccgcactattatctacgataatgtaatgtacatcattcccgacatatatatcaataaacttttttatataatctactgtatcactcattgatttgtaatcagtaataattaatgagtacatagaatctccttttgttttacttcgctaattcctgatagattattcgtaattttctagcgctatcctctatatcaaatccagcttcttttattttttctctagaaccatatggaaggcgttcataactcatagaggtgataaaatctgaccacttttcaacaccatcagataatgataatctataaaagtttgaattaaccgatgctgactctggaacagcagaacttaccacacaaggtagtccagatgcttgtgcttcaatattcacgattccaaatccttcatagaaagaaggtaacaaaaaaacatccattgcttgtaaatattgtgctggttgttcttgttttccaagcaataaaacccttcctaattttatttcttcgtctagcagcgtttctatattagctcgttcttcaccatcaccaatccatataaaataaaaattaggtaccttgagaaaaaaagtatgtattaggtcaactataaattcaggatttttttcatatgacattctcccgacagtacctaaaacggtagcctccactggaatatttagattctctcgtaccttttgccttaactcttcattatataaaaagtcattgattacaataccatttttcagtatcgccacatcagacaaatcagtatcgccatacaaataattcgctgcttcaagtgaacaggccaacttataatcaacaagaaacttaattatttttcttgccgttaacatttttaatctgccaacaaaacccttaccacgactagatgaagtagtgtgagcatgaagtactatttttgcacctacaagctttgacagaataatattaaataacccctcgatagcatcatctgcgttaatatgaacaatatcgtacttttctttttttaaaatagagtagatatttcttagcctttttattttacttgatgcttccttaacatgttgaacctgtcccccgttttcttcaattattcgatgaaaactagggttcttcaattttccaatagccaaaaagtcaacttgaaagtcgtctgttaagggacgagtcaagttataggctattacagacctacctcctgctccgaaattgtctgcccccatttgtaaaattttagttttcatctatttactccagtaactaatacattgaatcacaattcaaattgagacttgtcaggataacgattagacaatatcttagaaaatttctccaagtcattttctgtcatcgccatatcatcattgacacaaagtaattttgtcttttttttcgataataatttaggaagctgatcaacagcggtaattgaaattgattttccaaaatttttagtagatggttgaaaattattactttcaatttgccaataacataataaataatgatttatatccgtattatagtctctaaatttatgtttagatgtttgaacaaaaatgtcttcttctacattccataaatgaattagtgtactcttttttattggaactggtgtatgctgattatagtatccagttatcttccatggaaataacaaaatattttttaaaaccaattgaccatatttaaaattgaaaaacttaaacggcgactgtttcaaggcttttttatttgaaaaatgtctatataaaacttctacattattaaaataaactttggaaaaagatgaccacggaaccaaggcttcataaacagccaatagcctcggttgtccgttgacaaaaaaatcatcaggcttaacatcttgaatcaaatacatgtcatcgttaaaaaaaacaaagttctctgataaaccttcaatgcggtgtaaattcaactcaattgcagcagaattaaatgttggtaaatattcctcaggcataaaatcactatgcctaacccattttagtttaggatgatttaaatttaaccattccggtttttgaccattagttataagataaatattatttacccacggtgcatgcttctctaccatccgaaaccaataattgaatgttccataatctctataacggtgcagattatctccatcattatcaacctgcaaactattagacgtatatttatttttttctctaatgaagtcaggatcatttccatcaacccaaagtacaacaaaatcaattttttcttccatgttaaatcacctataaaataattgtttggccggtctaactatataatttttttgttaaaagtccattattccgatacaataaaaaagaagaaagaccaaaaatattatgttacttttctttatcaaataaaatagtccaaacttcatttgccaaacccttgtctaaaaatctcagaatgatttcttaaaacaacatcaaaaaacgttttgtatactgaaggctagttttaatactttaagtctatacagtacatattttaacttatttggttggtctttcatttgagaaagagaaacactattcttaagcaattcttgtttcacttcatcagtaatgtctatatattctttgtctaatttagatttatacaaacttgctagtatgtgaatcaatccatttacataataaagttgtgagatatgcaactcttcttgatttaattgcgaacatacaaaatctgaataaaacatttctttataaaatccaaacatatctctaaactttttttcattccaagactgtgtaatagaatctgggttgtcaattaagtagtgatagtatttttgattagttgcatagaccttcttagccacaagaaacagtttgtaattagtgccaagatcctcatagtatttcccaattggaaactgaatgttatgatcagtgaataatgattttcgatagattttatcattagcaaacccagtaatataacgatgcttcagcatttgcacaaaagcatctttaccttcaaatacttgggtcacttctggttctgaaactatagcatcttcttcacccttcacaaactcacgattaaaagaaataatatcaaactctagagattctagcgcttctgctaacgctataaaggtatctggttcaatccaatcatctgaatcaggaaaataaacatattctcctttggcatgagaaatacctgtgttccgtgcttcagaaagtccaccattttctttatgaataactgagataaagtcataatccttaacatagtcatcacagatttgaggagaatgatcagtactcccgtcatcaacaagtagaatctcatagtccttccattcttgggcaagaacactttcaatgcaacgttttaaatatctttcaacattatatactggaatgacgacagttaatagtggtttcatagattatttacctaattttttattctactctaattcttctcctatctgatctaactgacttacaacattcaatgatatatggtaaatctttaaatcagctcggatataatccttttttcagcgaatttgattatttaatatttcttatacaactccgaaaaattccgaatataactttgtaatgagaatagttctttttggcgtttaacagatgcctttccaaattgttctctcttctcagtgttctcagccaattcttgaatagccttggataattcagaaggttgatttggtgtggcaagaaggccgttttcgccttccttaaccatttcacagacaccaccatgacggtaaccgactacaggtttaccacaagccatcgcttctagtacgactgttggtagtggatctggattggtacttggcaagacaaagatatcaaacatattatagagttcggttgtcttgctataatagtcaattcgcttgatttgtccagctactggtgagtctgatatagccttctccaactcctccacgcgccactcttcaccttcaaatgcacttcctgccaaaaaggctactgcttttggattagcctgtaagattggcgtcacagcttctaggaagtcgccttgacctttccaagcattcactcgaccaaccattccgatcaccaaagcatcctgggcgataccaaactgatcacggaccgcactagcatccatcacctgataaacagcattgtcaacaccattatagatgacttgaacttggtcatcttttacaaaacgagactgcttgacatgattagcaacagcatttgaaactgtcacaatcgtatccgcatagcgccccatcaaaaagttgatgaaatcagagattgcttttggtttgacgataatttcatgcacatgccaaatcaaaggtaatttcaacttacgtttaagataaatcccctcaagtaccgcagtcgtattattgtgaataagagtaatgccattctccttagcatactgagcaatttgtttggagtaacggttataggagccaaagtactcaagaatgccttttggattaaaatatttccggcgcaaaattgggtaatcaataactttaaccttagcaccgacctcttctaaagcacccactaagacaccgtcattgggtaaaataacgtgtgcttcaaaagcatctttatccaaacccttaataagctccaacaaaaccttgtcagcaccatacatttcggcaccagcgtgaagatataaaattttctgcatttctatcctttaaatactttctcgtagtctgtaacaattttttcccaagtaaaggcttcagcaatccgttgacttgatttttgattgagatcttcgattgcttgagtatccatttgttcagcctgatcgatgacatgtgccaattgatctttcttccaatagagcgccccatcttcaccgacttcacggttaaagccaacatccaacaagagattgagcttagtagactcaagagcctcaagaagggatggattggtaccacctacttcatgaccatggaagtaagcaaaggcattctcacggatgtatttgagcaattcttgatcatagaccgtcccgacaaacttcactcgaggatcttgatcaaatccagtatctttacgcaactgttcatagaacttgttttgttctacattggtaattagaacaaaatctttttgggagtttgactgcataaagccacgaatcatggcctcatagttgttttccggtacaaaacgtcccacgacaaggtagtaatctccttcagtaacttgcttatctgcaaaccaagtccgtactttctcgtcttctttactcaggatagacttgcttgtatcggttccataagcaatataggtcgtctgtggctgatacttagcataatccttctgaatataagcttcgatgttcttactatcacaaatcaaaagatcagcatgtttgaccatgagttgctcagaaaacttccaatacttgcggactggaagactccacttggcacgaagccactcatgaccatccggattgaccatcagagttcctccgatagccttgattttcttttttatccttgaaataaagggaccaatccgacaagccaagacataaaagattggtgcctggtccttgttttcctttgcgatttcaatcgccttattaagtgctgcaatatcgtaagcaatggcacgtgcaggaccaatattagggacatcaatgttgtagcaaattgcaccgttatgttcaaaagtatctgcagtaatccctgatttggctgaattctcccgcatacaagctacataatactggatatctttatcttgttggaattctgtcaacttttcaacaaaggtctcaaaaccaccatattttgctggaatccctttggaaccaacgatataaattgattgtgtcatttttctcctaacatggaaaggacgaagtaggcattttcctacttcgctccttcttttctaagtacaaccttcacggtcttgagcaggatctgaatatctctccagatcgtccaaccatccatgtatgcaacgtcgagtttgaccacttcgtcaaaatctgtaatctcactgcgtccgctcacttgccaaaggcctgtaatcccgggcttgaagctgaggcggcgtttttgggctggcgtatagtcttggtattcgtctaccgttggaggacgagttccgactagactcatatcgccgatcagaacattgtaaaattgtggcaattcatccagactggtcttacggataaagcgtccgattggtgttacccgtggatcgttttccatcttaaacatcccaccagtcatggtgttttgcgccatcagatcttttttaatctcttcggcatccacgcgcatagagcggaatttatagaagttaaaataccgtccgttctttccgacccgcttctgtacaaagaaagcaggtccaccatctttgcggattagagggaccaaaacgatactcactagtccacaaatcaagagaccaaagagggcgcctacaacatctaagagacgtttagcaaagacgtgacttggtttatagaaattggttgagaaagtgacgacacttagtcccccgacttctcgaacccgtttattgcccaaggaagcgaagttaaaggcattgagattgaccgatacatcgatccccatactctcaaactccgagacgaaatcactaatattgtagtcctcacttggcagattgataaacacttcatccaccacttccttggtcacaaagttcatcatttgatccggctgcaccacccgtacacccgaatgggtaaaatccgtatcatccatgacagtgacaccaatcagttccccatgatagaggctaggtgaatgcagaatatcaaataccttttccatccgactggtcgctgtgatcaagaaaatctttcgcgaacttttccgtcgtggcgaaacagacttccggtatctcttgagcaagagatccatgatatagacggaaaacgtattgaaaagaaagaagtagatcatcccccgacgagagatggaaaagaccccatcgagcataaaagaggtaaaggtgatcccaacagcgaaaaatacattgtatttcaagacctgaaagagctcatctagatagcctctgctataaaaacgataggcaatattgctaatgtaaaaggatacaaaatgcaagagatagagaatggcaattgtctgcgacgtgtattctgcatccttaaaaagactcacaatgtaagccgaaaataggacagctaaactttgaaagagaacaatatttaatttttccagttcgattctttcttctcccattttccctcgatcctattctttactttttcccgtactctccgtaagatccatatccaccgtatgaaccatactcagcagctttaatgttaaatttattgagcacgactcctaagaaaggggtgcctgtttgttctaattgttccttagccttttggacagccttgcgtccattggcaccagattctgtgatcaagacagttccatcacagcgttgggcgataatggccgcatcaatcacgaccccgattggaggcgtatcgacaatgatgtagtcaaaatgctcacgcaaggcatccatcatcacagtgaagttcttgctttgcaagagacctgttgggtttggcgctacctgtccagactcgatgatatccaaatttggaaaatcagtcgcatacaagatttggtccaattggctacgaccagataagaagtcggtcaagccttggatcttatcccggctacggaaaacccctgtcatgacagagttccggatatcgcagtcgaccaagagggtcttgtaacccgcacgcgcaaaggcaacggccaagttggttgaagtggttgatttcccttcattttcttgaacagatgagatggcgatgacttttaagtccaccccactcaattggatattcgtcgctagggcattgaagtactcttctgccttccgaatttcttgtaatttattttttgaaatttctaacgtattcatgcgatccccagtctacagtttcttaatatctggcacaataccaagcaaggttaagcccatcaactcttcgatatcttctggtctcttgacacgatcgtccaagacttctactacgaccatgagaaccaccatcaaaccagctccagcaataaagccaagaaggacattgcgtcggatatttggtgaagaaggtgattgaggcacttctgcttcatccaaggtcgtaacatctgataccttggtcacagcaatgatcttttcagctgctacattccgaaggccattggcaatacgagccgcttcttttggatttccatccttagccgtgatcgaaaggatacgagtatctgttggaacggatacactgatctttttcgacaactcagcaggtgtcatatcgagtttcaattcttcgatggcttggctcaagacattttgagaaagaatgatttcacggtagtccttaaccaagtaagaaccagcctgcaaatcagagtttgtcaaggcattgttgtcttggttttgacgactgaccacgtagatccggctagtactttggtactctttcttggctaaaaaggcactgtagccaaatgctgcaatggcaaagacaagagcgaccaaaacgatcgaaaacttacgtttccatagagtcttcagcatagcgaaaacatcaatttccactgcttgattttcttgattgttcatttcctaattactccttcatgtggatctctccacctgtttcctggttagattaattcatccgctaacaagagttcttgattgctgacaaagagagcttgtgctcgtcgttctccgtattcttccttgatcaagcgataggcttctgccatataaggcggtcgtttatccacattgtgcatatcactggcaacaaagtgcaccaagtctttttctaagaagtaccgagctcgttttttgagttgtttttgttcatccccaaagaggcgaggcttgagaacactggaactattgatctgcatgtagcagcccatgtcaatcatctcttgcacgcgctcctcatttttctccaagcacttgtagcgctcgatatgggccaccaccggtgtcacacctagatggagcaaacggtccaaggcggtatgaatctccttgtaaggtgttcccatgctgaattcaatcagcgcaaagcgcgtctcagctaaacgtggaatgatcttttcttccagttttttcaagacatcattcgtaaagtagatctctgccccgtaatgaatcgttaaatctggcgcgacctctgccgcaatttttttcacttcttgaaaattttcagaaatcttttcttcgggagtttcaaacatccccttacgacgatgagaagtggagataatggtccgcaccccttggcgatagctttcttccaataaggcacgcgtatcttctcttgtctttggtccatcatccacatcaaagacgatgtgcgagtggatatcaatcatttttcttttccttccattactttttgaatggtttccttggccttggtcaagctagcttgatccaactccataacatagaggttgtaaccaggcatagcataagacggcaagtcatttcgtccttgaccggtaatcgcttgagaagtcacctcataagaaccacccgtttctaactgggtattgatcaagttcatcatagtcggcaactgcatattggtttggacagaatcttggaggtttccgataatctcattgtagttgcttaagaccttggtagaagtcaactttttgataatagccgcgatgactttttcttggtttttcccacggtcattgtcaccaccttgaagagagtagcgttctcggacaaaaccgagagcttgctctgagttcaaatgaacctttccaactgggaaatggaacttgccatgaaggctcgtgaattcttggtcattttccacatcgattccccctagaaggtcaatcaacttgaggaaggaagtgaaattgagacgaacgtagtagttgagcttgatatcatagagattctcaagggtatggatcgaagcatccactccgtagatccccgcgtgggtcaacttatcattttggttgttaccaccatctgcaatcggtacataggcatcccgtggtgttgttgtcaataggacttgcttggttttccgattgaccgtcatgatgatattgacatctgaacgagaaaccgatgttactgggccataggtatcgatcccgctgacatagatgttaaagacatccgcatcggcagataccttgctcgtcgctgccacttcttttcggatcttgtaggaatagattttcttcaacttcttcgcatagtccgcatcttcagcggcaatggtatcctcaaaggtactgttgaggaccatagcagaagcattcccttcttgcaggctcttataggcatctagataagtcggtgcatccactacagaaatttcctgacccttggtctttttgatgttgtccaagagggcagtaagattagcttcgttattgttgccctttggtgctaccacttccttgatttctttgatatctttgatgtcactgtctttcttgacatagacagccatctcaaactctgtatagttagagtggccattgacattactggtcagattcagcagctgttgactagcaaacaaaactcctgaactagtcaataagccgacaagaagcagtaccaaagttgtctttttggcctgatttttgatcacaaaccaagctgacaagagcaagagaacagttaatagtgcaatcacgagaacattgacatagcgaaaagccaagatgttattggccaacatggtataggtcgcccaacttgcagtcataagcaaaaaaataagcaatacggaattaatgattcgcaattgcccccacttatgttctgaacgacgactccgtctcctttgtgacataaatacctccaattagtcctaatcatatttattgtaacatatttttagcaaaaaatgcattaattatcacttttttgtccattatgtacatttaaaaagtaagcgttttctgaaatgggtgaaaccccttgtatacttatgcagagaatccaaaaaaaccgggtgaaaaacccggttcagattgaagatcctacaaaagatcatcccgtttgacctgctcaaagctttcctcgccgtcattgagcttgtcccagatgacaacctttccttctttcaatgatttttgaacatcaatgatccgctggttagaagagcctcggaactgcaacatgaggttgcgtttgcttttatcataccgtccatcgaccaggatatcaatcagcgacaagagctccagtttatcaggcgtttctaacatcatttcttcccaagtgtagccggtccaagaccaaatgtctttgtcgggcaactctttccgaatgcgtttaacgagaggcaaaagaattccagtattcaggaatggctctccaccaagcagggtcaagccctggacatagggttgggccagatcagccatgatctgctcttctaactctttggtatagggaatacctgcattgaaagaccaggtcgctacattgtaacagccctcacagtgaaacatgcagccggccacataaagggaattgcgcaccccttcgccatcgacaaagttaaaagccttgtagtcgatgatgcgcccttgactcagctcctcactcttccattcgcctggtttaggtgtattccatgtcatccttctactccacttctatccaataacgctccgttccatttcgaacatcttcaaattggccgccattagctaagataaccgctcgactggcaggattttccgtgctacaagtcaccagagcacgatggatgttcttttctttagctacttgcagaccttgatggagagcttccttggcataacccttacctctttcagaaggacggatggaatagccaatatgaccagcataattcagcaatccctcatttagtctcaaccgtaaatttaaaaaacctaaagcatgacctgattcatcaaacaatacgaactgaattgatggaacgcgattttcaggcaagtttattcccatttctttattaaggttagtttctagccactcctcataatcaaagttctcagcatcccaaaagccgccatcatgggctgactggctctgttcaaactctgccgtcatctctaaaactgtttctttatcttctaatcttggtctacgtagttccatctttacctccccccatacgagaaaagcgagagcggactctcactttttcttatttttatttaaaaattgttctctcaggctggctactcggtcttttttattgattccaccctttgaatgcttctcatggaatcgttgaacctgagccttacctttatcatctaattggtattttcccataatatccttttctaatctgtcacttggtgtccagctgatttgatagtggatccattcatgtgtttgacccgtgccgcgatttccttatgacggccattgaccatcggacgagcttgagggtttcctagataaccacaggtccgtttgaccacatcaaccgttttcggatcgctgttgccacagtttggacaagcaaatccgcgctcagtcggcgtgaaatctccttcaaaatcacacttgtaacaacggtcaatcggcgtattggttccgagataaccgacccggtcataggcataatcccaaaccgcctcaagggcttttggattttgttggagcacagggtattcacaatagtggataaagccaccagaagctccagcttcaggataaactttttcaaaatccaacttctcaaatggcgttgggttcttacgaacatcgtagtggaaactattggtgtagtattccttgtctgtgatatccggaaccttaccaaatttctccgtatccagacgacagaagcggtctgtcaagctttctgacggtgtcgaatagatagagaagtggtaatcatactggtcagaccattcttccacgcgcgctttcatatccttgatgatatcaatcgtgaattgttttgcttctggattgtgttcccaatttggaccataaaagacggttgcgacttcatagagtccgatatagccaagagaaacagttgctctgcgatgacggaagagctgatctacctggtcatatttacccaagcgtttcccgaaagccccatattggtagagaatcggtgcattggctggtgttgcttctttggtgcgttccacccggtaaaccaaggcatcttcagcgatgttcatccgttcattaaaaatttgccagaatttttccttgtcgccgtccgactccaaagcaatccggggtagattgactgtcacgactccaagattcatccggccagaattgacttccacaccattctcgtccttccaaccttgaaggaaagagcgacatcccatcggcaccttgaaggagcctgttaattctacaatcttgtcataagacaaaacgtctgggtacatgcgcttagtggcacattccaaggccaattgcttgatatcatagttaggagttccaggttctaggttgagcccccgcttgagggtaaagatcagctttggaaagatggctgtccgatgttccgatccaagtcccttgattctaatttccaaaatcgccttttggatttcccgttcgaagcgattggttccaagaccaaagccaagcgaagtaaagggagtttgtccgttcgaggtaaagagcgtattgatctcatattccagcgattgcatggcatcatagatatctttttgagtcttgctccaagcatagtcctcttgcttttcaggaagtacccactctttggcatctgccaagtgtttttggtagttcttttctgcataaggggccaagacttcatcgatccggtcagctgagcaccccccgtactgactagaagctacattggcaataatctgcgagatttgagccgttgcagtttggatggacttaggactttccacttctgcattcccaatcttaaagccatttctaagcatgccttcaaaatcaatcaaacagcagttggtcatcggtgtataaggactatagtccaaatcatggtagtggatgtcccctttttggtgagcattggctacgtgtttgggtaacattttgaggccaatagacttaccgacgatccccgcagtcaaatcccgttgcgtattaaagacatcgctatctttattggcattttcattgacaacagcttggtccttgttgaggagtttgccgatggtaaagttgatgtccgtcgcttttgagcgctcaaaatcccgctgcgtccgataagtaatgtagctctcagcaatcgcatattcgttggcttgaagcaattcatgttcaacgacattttggatctcatagatcttcacgccatttgggaatcgctccaagatctctgcgatcacacgatcgacaatggcttctagtttggcttccagcacgggagtgagagaagccacttcttctgtcgccttcaacaaggctttataaattttttcaacatcgaattgaacacgacggccatctcgtttttcaacaaaaatatccggggccattctcagtttttcttctctcaaggtgatcataccaaacatgcctttcttcattcatttacatacaagttgtattataccactccaaaaataaaaatcaatatcttgtggtgaaaattctaaaaaactttccaaaacacaagatattgatttcattaagaccgttgatagagtttgaaatgacggtatttcttctcaactagacggtaattttctttcagcaagttcttcatatcagaggtcaactctacctgattgttgactacaatatacttgggttcagaccgatcgatttgttgaatcacattggtccgattttcatttatccccagataagaagttggggtcaataaagcagatgccgccaaacgatcgctttcttgatagagagtagccgtcgcatcccaagcatagatggtatccttcgacttggtgtgatggttaatatagctggcaatcgcgctccgttcactcgattggccagactgaagcacgacatcttgaaccactggatccaccaataaatagacaagggccactagtggtaagaaaacttggctcgtaaagtaagcagcccaaacttccttgtttttcttcttccgaccacgacgttcagtaccctcgctcgcttccccatcacgtgagaaccagactgcaaacaagggaagaacaaatggcaacatcggtaacaattggtaagcgccctgttcaggaagaccaatagacacaacgaggataaccagactacctacccatcccataaagcggaagatccggcgagcactgctactttgcttggtaaaggacatcaaaaaggcagaaactagaccgaaggccagcgccaacagtccataataaatggcattactgaaggcctgtccattactaaaattcaaggcattaaagacataggttacttggttaatggcatagccaaaagtttgattccaaacggtgatatagccaattggataaaagacaagtgaaaaaccaaggagagctgccagcagttgataaaagccacgcgcccatctcttctgcttgatgttaaaggctgttaatccaaggaaggccaacaaataaaacagggcactggtcatcggatcaatcaagaaagccacagctgcaatcgcaccataaaggataaagccttcatccttacgatgcccaatcaaataagccaaaatgaaattcatgctggcaaataggattggaagactaaagagagtcacataagtccctccaaaaccaaggcctagcaccaagaaataaaagagcaactggacattcttcgatgtatctgtatctttatctgacaccagcaagcgcacaacccgatagaggtaagtccccgcaaagaagagggcaatcgcttgaaggatcatcaagatccaatgtccaccagctaaacttcccaaccagttgattgcataatagagcagaccattggttccgtaaaaatcaccaaacggtacttgacccttggtcattgcccagccagcatacaagttttgcgattgttgattggttgcaaaacgggttaaaaatggcaccccgacatgcagcaaactaattaagagactcaacacaaaaggaatcgctaggggcactggacgcttagcttgacgacggatcggctcaactgccacatccgcttctagctcttccgtatcctcttctagcttagatgcttccgcttttgtcgcttcaactcccgccttacgtgaacgacgactcatccgactgagcggttgctccgcttcctgttccgattcttgtgtaggttctgctactgtttctggctttgcatcacgaataggctctgatacctccattgcaaccggctcctccaagacttctgcctgctggctatgagtcggctcttcttcacgaaagactgatttatctagcacttcgcgaatttcacgtgtatcctgaaaactatctcccacgtgaagccctaactttttcgaagtcatttcttgctctttttcgctcattctttttccttttcttcgctattcctctgctctttccttttagaaaaaagcccattatcttctctagtataccaaattctgccgaccctgtcagcctcttgccacatagtcctatggaaaaagagtcaggcatctcgattcctgactctgattttcgtttttatacatttacaacatcggtgcgaacaattgcataatttccttgattaagctttggtgccatgtaaagcggaaggtatcctctgtaatttcttgagacacttcaaagatatggtcaaagtcctcacgaatctttttcaaggcaggcgtccgatacatccagacagcattttcatagtgatggaccaaactgcggtaatcaaagttaatcgaccctacaaccgccatttcatcatcggcaagaacttgcttactgtggacaaaaccaggtgtatactcataaatctttactcctgcatccatcagatccaagtaagccccacgagttacgatttggatcaattttttatctggaatatgcggggtcacgatccgaacatctacccctcgaagggctgcattgcggatatcctctgtcaaatcatagtcaatgatcaagtaaggagttgtgatgtagacataatccgttgcttgattgatcatattttgataaaccgtctttccgacctgcgacttgtaaatcggctttggtccactcccataaggaatgtaaagcccttctccctcaaccgccttgttttcaatatggtagcggtcaaaatcctcgatttccccacggttgatgtaccagttcatgagaaacagtcgggtcaaggctttaacagctcgtccatctaaacgaatggcactgtccttccagtgaccaaaacgctcaatgtgattaatgtactcgtctgccaaattgacaccacctgtatagccaatctgcccatcaataaccaaaatcttgcggtggtcacgattgttataagccactgttaagcgggggatcaccttgttaaatttatgggcatcaattcccatctttcgcaaccgtttggtatagttccctgccaaggtcgccatacagccgatatcatcataaaggagtttgacttcaaccccctcttttactttctgttctaaaatctctaggatgctgttccacatcaagccctcgtcaatgatgtaaaactcgatgaagataaattttttcgctgctcgcagatcctctagtagttgcgcatacatctcctcccctagagggtaaaaggtcgatgccgtcccattgtagagatccgcattgtggtccatggataaaatcgacttgaccaagccataaaccgccttgctttcttgcttgagctccttacgcaactgatgactattgtcctctcgaaacttcatggactccatattttccaactggatcatttccttcttggacaaacgtcgctctccaaacatgagatataagagcgatccaaagacaggaatgacggcaatcaagagccaggtcaccttattttcaggaggggtgttgcgattgacgatggccaagatcgtcgacacatataagagcccaataaccacaacagatagccaatgagggaaccatctgttaagccagaagaaggccgcaaaggatgcccatagttcaaagcccataaacaaaatactaaatccatatttggacattaatagacgtaattttcgaaaggtcacagcatcctcctttttttctttctactagtataccaattctttttacccgttgcaacgaccaaccaaaccccttctagacaaacaaaaagagagtgggacagaagtcctagcctctcaattatttttggattgtcgagcaagacgcagtggttgagtgggctctactacgctgattttatcagcttttacagccctactcaactgtgcggaggtgggacgacgaaatcgaattctaacgaattaccgatttctgtcccactctctcttgtttcgtcccttattgcttggttaaaacgataatcccttgatcatcctctgcttgctccagatcttctagcgacaactgattcccttcgatccgatagcgatagggttcatccccgatacgcatggattgattgaccggatcaatactgacctctttggtctcttcttctccatcagcatcttgtaccgtaaacgtgccttttcgccccgtcacaactaagagaatcgtattttcctcgtcctgtcctcgataactgccatctatggacattccttctttctgttcttcactcgctgaagtcacagtctgtgatgaagtagacgtctgtttgctcgaagtctgtgtcgctttttcttgctggctacaagcagtcaggaaaagagctaccgccaaggtcagtatagacatgatttttttcattaagatcgactcctttcgccataaccgtatactatctaccaccagtatacgccaagaaagtctttaggtcaattgtttacccctctaataaaaatgcccttacttctgcaataaaatacaaggaacctgtcacaaataaaacctcatctggatggctctgatccataaactctttgatataggccttgtagtcagccacataaggcaggtcttgtcgatcaccctgcgccaccacttctccgtaatggaaggttgtcaaaatcaattcagcttctggcaatcccgtttgaagcgtttggagcatcccgctataatcttttcgcttgagggctccaaataaaatcttcacgcgctttcctgctaagctattggcaaactcgatcaaacgcaacatagcatgaggattatgggcgccatccagatacacctggtcgccaaacaactctagacggcccggccaccgcgtttcttgcaaggcgtgcttgacctgatccatatctacttcttgatctaggccttccatatagaggagaaaggtctccagagctactgcagcattttcccgttggtaatcacccttcaagcccagagacggccagacaagatccacacgttcattccaaaaacggtcctgctctaagccaaaatctttctggaaggcatggagatccacatccaattgtccggccctttcttgacaaacagctacaacatcatccgacaagggacccaccacagctttcttgcccttcttaaagattcctgccttttgctgggcgatttctgcaatcgtccctcccagtgtttcctggtgatccaggccgaccgaagtgatcactgcgatctctcccgtcactacattggtggtatctagaagcccaccgataccaacttccaataagaccacgtccacagcttgttccttaaaatacaagagggccatgaggcaaataatctcaaaataagagagttggtcctgggtttgaagcaaggtccgctccatttgttggacttcttggccaatccgagtaaaatcttcatctgaaatcggctgatccccaatacaaatccgatcatggatactgatcatatgaggagaagtaaaggtcccaaccttctttccgtgagccatcaacaattgacgcagaaaggcgattgtggatcccttcccattggttcctgtcacatgaaggataggataggccttatccggcctccctaaaaggctcactgcctgctccatacgatccagtcccgatcgaaaattcagaccgatccgactattcatccattgctcaatcttattcacatcttcctcctaaaagaaaaaagcgacaaaaccccttctgacgtttgcgctcctttcttttgtagttatttctttctcatttttacagcaagtccatcggacttaccaactctttctagtttctaggagttgaggtgatacaatctcccagacttaccagctctctcgtatttcaaggagctgggctaaaaacgtcccccggacttaccaactctttccaatttcttggagctgggctaaaaacgtcccccggacttacttgcggtctttatttttagcgcaagggtaaaaatgttcactgaacatttttactcctccataaagctgttgaagacttcttcgatcatatcccattctgcatctgagtcttctgggattggttgaaggtcgccttctgttccgtcttcgttttctgtaaatgaataagcttggatttcaacttcgccgttttcatcttcttctgcatttgcagggatcaaaaggacatagttctttccaaattcttctttgccatcgatggtcaaaagaatttcaaacaaggtttcatttccttgttcgtccaccaatgtgattaattcacgttcttcatggtcgtggttatgatcatgtgccatactattcttcctcgttttctttctaaaaattgcgatctaaataattttgtaaaataagctgcgccgctaacttatcaatgacttttttgcgtttgctacggctaatatctgcttgctcgatcaacatccgctctgcagcaactgtcgtcaaccgttcgtcttggtagtcgactggcaacccaaacttttcagcaatcattgcgccataagcctgactagcttccacacgcggtccgctggtgttgttcatgtttttcggcaagcctacaacaaaacggtccaccttgtattgagctactaattcggctaaacgctccaaaccgaattcttttttgtcttcatcgatttggatgatttcaagaccttgagctgtaaaaccgagaggatcactcacagcaaccccaacggtctttgagccaacatccaatcccataattctcattagaggtctattccttgccctttcaaataataacgtaccaattcttcaacgatttcatctcgttcatatttacgaatttggttccgtgcattattataacgaggtacataggcaggatcaccactgagtacgtatcctacgatttgattaattggattgtagcctttttcatccagtgataagtatacatctttcaaggtctcgctaatttccttacgatttgaatcatcaagattaaaacgtactgtttcatctgtaaatcccacaagaacaccctctttccttagaatattactattataccataatcaagagttttccacaacggtcaagtccttgattttacggctttttcaagcatttttgagctttttcaactaaactgttttttatttttgctcactcgctccagcattgatgaggttgtccgcaaattggctcggtgtcagcttcaacaactccggcaagtgattgtttttgaagtaggtcataccttcagccttcttcacatccattgcttcaaagtcataggtgatggtcaccttgtattcattctcattttccaaggtcaaatcagctgtgaagccaggaactgtcaatgcttccttaaaggcatcatccttggtaaaagattctctcaattgcttttgcgcttcttcgactccaacctgttggatcccttttttcagttcctcatcagttgccgtcacattgacggtctctaattttttaaaggtattccccacataggtgacgatttgcgtctgttgtgtccccttatcatcttttggaaagacaaaggttctagtgatgactttattttcttcagccttttgcagaatactcttattatccttttgcagctgttctgcttttgcttggattgccttttgttcacttgaatttggcgttttcgcttgttttttttgaccacatcccgtcaaacacaatacaagcgcacccaataagaagattttccttttcattttccattccttactagttattgttttctaaaatattgtatcatagatttcgtaaaatggcgcagtaaactgcttttcattccgatttttaacaagaaaaaatcagaaacaaattgtttctgattttcattcgctttaaagagctgcacgcatccgcgcttctgcattttctacatttcgaactgatcgtggcaagaaggcacgaatatcatcttctttgtagcccacttggagacgtttgtcatctaccaagatcggacttttaagaatacgaggtgtttccatgatgatgtcaatgacttcattgacactcaagtcttcgatgtccactcctagatttttagcgtatcgattttttgaagagacaatacttgccactccattttcagtctttgtaaggatatccaataattcttctttggtgatcccttccttaccgaggttttgttctttataggttagctgatgagcgttgagccaagtctttgcttttttacagctggtgcaacttgacactgtataaattttaatcatgcatgcactcctttcgctacacgataatactatcgtattaaattataacacaaaaaccatcagtctagcgacctattttgaaaaaaattaatcttcaatttcaatcgcgtcatctaaatctagagttacttcttctacgacaggagctgcttcttcagttttatcaagggttttcactgcttcgtcttcttcgatcaaaccaaaatgaacccgaaccttgtggtcgatttcgtcaaaaatttctgggtggtcagccaagaatttcttagcattttcagatccttgaccaattttttcgccattatatgagtaccacgcacccgctttttggatgatatccaaatctgttgcaatcttcaccaactcacctgtacgtgaaattccttccccgtacatgatttcaaccatggcttctttgaacggtggagctaccttgttcttcacaaccttgatcttggtttccttaccaacgttggtatctttttggtccccagtccccttgatttgagtatttccacgaacatctagacggacagaagcgtaaaatttcagggcacgaccaccaggtgtggtttcagggttcccaaacatgaccccaactttttcacgcaattggttgataaagatagcaatggtcttggtcttattgatcgaagctccaagcttacgcatcgcttggctcatcatccgagcttgcaaaccaacgtggctatccccgatatctccatcaatttccgcacgtgggaccaaggctgcaacagagtcgacaaccaccaaatctaccgcaccagagtcgatcaatttaccagcaatttcaagtccttgttcccctgagtctggttgagacaagagaagttcgtcgatattgaccccaagagctgctgcataagatggatccaaggcatgctcagcatcgataaaggcagcaatgcccccttctttctgtgcttgcgctactgcatggagggcaacggttgttttaccagatgattctggaccatagatttcgatgatccgaccttttggataaccaccagcacccaaggcaatatcaagcgccaaggaaccagagctcatgacttgaactttttgctctgcacgttcgcctaaacgcatgattgatcccttaccaaaatccttttcgatcaacttcagggcatcattgagcgctttttcacgctcatctccaaatttcttagagatatcatctaattttttctgttttttcgccattcttttctcctatgtttttgctatacaggaaatgcatgcaactcaccgacgttttccgccatttgaaaggcacatttcctatccatttttagaattattcttcatttggcacaagcttcattataccaaattttcaccatttaatacagccaagcgtaccaaattaaaggcatgaagaactgcaatttcgcggacatccgcccggctacgtccggcgatattgacttggacactatctactccatttggagtcgcaagtccgataaagacagtccctgctggatgcccttctagactatctggccccgcaactccggtcaggctaacaccataatcggatcctgttaacttacgggcctgtgaagccatggcttgtgctgtaaaatgagacaccactccatgttgctctaactcttgagctggaatagacaacatcttgcttttttcttccagactataggtgacaaaaccacccgcgaagatgctggacgcccctgaaaaatctgccaaagtcgcttggaaaaggccagctgtcaggctttctgcagctgtaatggtcttaccagtctgtttcaagagatcaaaggccaccttagccatcgaattgtcatccccataaccgtaaaacaactcttgcaaaggttgatggtccagggtgtggcgtgataagatttccttttctaagacatcgagcttagcatccgctgaagcttgatccttcgcctttgtagatagacgcaaggttacttctcctgtcttggcataaggggcaactgtcggatcactctgctcttcaatgatatctgctaggatcgtaaccagctggctttccccaatcccaaagaagcgcaagactcttgaaaagagctgttcccctgttgtcaaatgaggcaccaattgttcattgaccatgggttttaactcacttggtggaccaggtagaacgacataggtcacaccgtcgacttcaatcaaacctccaaccgcgagacctgtacggttttgaagggggattgatccggcaatcaattgtgcttgtcgctcattattgggcgtccggacataatcaggacgactcgcaaagaaagtgtcgagtttagcaagcgctgttggatcaaaaaccagttctttccctaaaaacttagcaagggtttgcttggtcaaatcatcctctgttggcccaagtccaccacataaaatcaccaaatcactgcgttttgaagctgtctcaatggtcgataagagacgaccttcattgtctcctaccgccacatgataatagacgtcaatccctaaactagccaatttttcagacaagaattgagcattggtgttcacaatttgtcctgttagaatttctgttccaactgcaataatttccgccttcatggtgcctcctacttatactattcgtaattttcatttcattttaacacaatttcctaaattatttaaaaaacagattgaagataaagtccattttggacaactttcttcaatctttttcttttagagtataaagtaaaaaattcttagaaacactattacatcaacattcctaagagttttaactatgtggtaatcaacttctaaagggctattttctattgttgatagagcttatctatattctgaagcaaccataccgagcggttgcttttttacttctttcttgatctaaaagccttcttctggctctaattcttgttgtttcccctcattttttgtgatacaatagcatcaattttttctaggaggatgagatatggtttctactattggtattataagtttatctagtgggattatcggagaggactttgtcaagcacgaagtggacttgggggtccaacgactcaaagacctgggactcaatcctatctttttacctcattcactaaaaggcttagactttatcaaagaacatcccgaagctcgtgcggaggatttgattcaggcattttctgatgatagtatcgacatgatcctatgcgccatcggtggaaacgatacctatcgcttgctaccttatctttttgaaaatgaccaactagaaaaagttatcaaacaaaagatttttcttggcttctcggatacgaccatgaaccatctcatgttacataaactaggaatcaagactttttacgggcaatcctttttagcagacatttgtgagttagacaaagaaatgctgccatatagccgccactactttaaagaattaattgagactggtagaatctcagaaatccgccctagtaacgtttggtatgaggaacggactgattatagtcccaaggctctgggaacacctcgtgtcagccatgcaaatacaggttttgacttgttacaaggcaatgctcagtttgagggagaaatcctaggtggttgtcttgagtctctctatgatatttttgacaactctctacacgcagatagcacagacctctgccaaaaatacaaacttttccctgacttgtcagactgggaaggaaaaattctcttgctagaaacaagcgaagaaaagcctgaacctgacgacttcaaaaagatgttgcggactttaaaggaaactggtgtattcgaggtcatcagtggactattagtcggaaaacctatggatgaaactttctatgacgactataaagaagcactattggatatcattgatagcaatatcccgattgtctataatctgaatgtcggccatgcaactccaagagcaattgtcccctttggagtccacgcccatgtagatgcaacggagcaagtcatccactttgactataacaaataaagctgggaagaatttctcagctttttttctatattctcagatactctagttacctatactcactaatcaccgtttttccattcacaatcattctcatggtcatcaaccaggcctgctgcttgtaggaaggataaaactgcgactggtccggtgaacttaaaaccacgttttttaagatccttggctagcttctcagaaagagctgtcttcgctggaacctgccggtaatctggaacatcattgacgatggtttttccatctacaaaagaccaaagataagcatcaaacgatccaaattcctcctggacttgtagaaaggcttgagcatttgcccgtgtcgcaaaaatctttgcacgattgcggatgatggctggattgtctaacaaagtttccagttcagagtcggtcatctctgcgacgcgttgaaggtggtaaccatgaaaagattctcggaaagcctgccgtttattgagcaccgtttcccaagatagaccggcctgataagtctccatacagagcaactcaaaaagcgcctggtcatcatggaggggccgaccccattcttcatcatggtaagctacatataacggattggtcattttgacccagccacagcgttttggcatcttcttctcctatttcaccaacatcttaagagcagacttgatgtagttttcagcagtatcagaagttccttcaaagaatttcttgattttcttgagttccgttgccttgtagcccaatgccaacatggcttccatagcttcttcaagagcttggttttcttctgttgctttggctttggattgagccggtgcatcttctagatcaagattgatcttaccttctaggtccaaaaccatctgttgagctgttttcttgccgatctttggaaacttggtcaagtaggtaatgttcttgctttcgatggcttggacaaggcctgcattatcgtctgcagcaatgatggccagagctgagacaggtccaatcccagagactgagatcaagtttaaaaagagctgtttctcttcttcggttgcaaaaccataaagaaggtgggcatcttcacggaccacttggtgcaggtagacttgcacctcttgattcattttgccagagtaggcatagggattggccacatgcaagagatagcctattccagctgtttctaccacgatgtatttggcggtgattttcgtcaaaattcctttaatgtattcgtacataatcttcctttattgtttgattaatatttgcccaattcccgtaaactggtgtgattttcctgaatgcgtcggaacatcttttccatatccgacttggtgaagttaaccaagaccggacggccatgagggcagttataggggttgtcacattgggacaattggtagatcaggtcgcgtgcagagtaatcgtccagcgtgtggttggccttgatggagcgtttgcaggacatcatgatggccaactccgcccggtatttcttgatagacacttccttggtcaaaaggagcatatcacacatttcgtagatacccgactcgatctcttcttccttcatccagatcggatgctcccgcaagatcaactggttagctccatattcttctaagtagacgcccacttcttctagaaggtgtttgcgctgttgcaggcggatcagatcgtctgtagggaactcaaagatataaggcaccagcagttgttgctgactgccgtctacgtccccgatgctctcccggtattcttcgtatttgacccgctcttgggctgcgtgctggtcaatgatataaaggcccccattgccttgggcaaagagataggttccatgcatctgaccaaaatattccaactctgggaaggtcgaatgttcttccccatccaacttatcataggccttgtctagactagccagatccagctctgggtgatccagttcatcataaaccgcagtctttctttccgcaaacttgatcgcgcttgtcggtttttctgctgggttttcttgacttgtagaatcagcagttacctcatctgtcagaggccgttgaggatctgccacttctggtcgaagtttgaaatcttgactttctcggtcataatagagacggttttcctttaaaggcagggttgtctgtactggcttttctgttcggcgaatagtcgacttggctagattttctagagcatccggaatcaagtcctgctctttcaaagcgttcgcaatagcctgggaaatcaaggccattagttctcgttctttggagatacgcacttcttgcttggtcgggtgaacattgacatcggctaagtaagggtcgatctggatattaatgatcgcaagtggaaagcgacccaccatgagtttactgccgtagccgtctaaaatagctcgattgagcaagaaattcttgatgtaacggccgttgataaagagactgatgtaattgcgattggcacgagtcaattcaggcaaagacacaaagcccgtcacttcaaaatctaggtcgcgattttcaatggccaccatcttcttagcagacgcgaggccatagacgcccgcaatcgcctgccggagattacccgtccccgctgttttggtcatttcttttccatcattgatcaaggtaaaggcaatctcaggatgggccaagctcaagcgattgagaatatccacgatatgggacaactctgcctgctggctctttaaatacttgagacgagcaggtgtattaaaaaagagatcttccactgtgatcttggtcccgacagggcttgtcgctggctccacttcctcaatttcgccaccctttgcgaccaatttggtcccgtgggcagctccttcttgcgccgttagaagggttagaatactgacagaagcaatggaaggcatggcctcaccacgaaaaccaagcgttcgaatacgaaaaagatccgcttgactcttgatcttactggtcgcatgtcgacggagggccaaagcgacctcatcgtgcgcaattccttccccattgtctgtaatccgaatcgacttcaatcctgcttcttcgatttcaacaacgatctggctagctccagcatcgatcgagttttcaaccaattccttgaccacgctagcaggtcgttcaatcacttcacctgccgcaatctgattggctaggacttctggcaattcaataatctgtgacatgtctgctcctttacctattttttcaccgatacatgtagctctattataccacagatccacaagactccctttcttaaaaaatagaggccagtcccatcttcttccttaaaaaccgcataggcaaagaaaacgaccacatagacaaatctccttgtcttccctttggaaaaagtgtttaatagtagtgtaaagaaggagccgggctagcaggccaaccgactttacccaaaggagggagaaacgattttatgaaagttgaagtacacattgattcccacttccaagaagaagcggtgatgatcacagcacctgcactatctgcgcgtgtagagaaaatccgtgactttgtggaagaattggatcaaaaaggacgcttacgtgccaaaaaggatggggaagcttacctgatcgaaagccagctattccaacgtttttacattgaaaatcggcaagtaattggtgagaccatgacagatcaatttattctgactgggccactctatcagttatctgaagacttaccgacctgctttctcaaaatttcccaatctgaaattatcaacacaaaagaaatcgatcacctgcactttactagtggaggatcggtgcaaatctatcttaaaaacgggagtctgacctactcctcccgtcgttacttgaaagccattaaggagaaattatcatgctaaaacaatctttttctgacgccctaaaagggattttcatcgggctcatcttatccatcttcttttcctatctcttctcacctgagttgtaccttcccttaagtcccaactctgcagtcggtcgctggatgttcttgcatcatgttcacggctcactggtcatgctctattgtgctctcgtttggggtgcgattggggtcctctttagcttcggaagtctcctctttcaaaaagactggagcctcttacgggctactctgagccattacctactcatgttacttgggtttattcccctagctaccttggccggctggtttccagcacgactcggattttacttctcactcgttgtcgaattcaccctcgtttacgtgatcatctggttggtctcccatcatttttataaaaaacaagtccaagaaatcaatcaaagcattactaaccactaaaataaaagatcctcgccatcacgaggatcttttattataatttctttttcaattcggcgactgccatcatgacttccatgggagtcatattgtagagatccagatttttcaattctgtgatcactgtattttctgcctcctcctcaaagagggacatttgttcagcaacctgcgaagacacttcctttttaggagttgcatctgcaagcggtacttgctgggcttgtccttcgagcttggtcaaaatcgcatccgcccgcttcagcaattcttctggtaaaccagcgatcttggccacgtgaatcccataggatttatctgctgggccggattcaatcttgtgcaagaaggtaacctgaccatctcgctccaaggtcgcaacatggacattttccaagcgagacaaggtctctgagagagccgtcaactcatggtaatgggttgcaaacaaggttttggcacccgtgcgatcgtgaatgtattcgatgatggattgggcgagggccatcccatcataggtcgccgttccccgtcccaactcatcaaacaaaatcaaggactggggtgttgccttgcgaatggcgtgattggcttccatcatttccaccataaaggtagactgacccgataccaggtcatcagcagctccgattcgggtataaatcgcatcaaagattggcaactcggccttttgcgctggtacataggagccaatttgggcaagaatcacaatgatcgccaattggcgcatataggtagacttcccactcatatttggccccgtaatcagctgaatatcccgttcttcatccataaagatgctattaggaatataggactgggctcccatcactttctcaacaaccggatggcgacctttgtcgatcgcgattcgtcgttcttcatgaaagaggggacgattcaactgttgcgactcagcgacactggctagactttgtaaaacatcaaccgtcgcaatcgcctgagctaattgttgcagacgttggatatacttgccaacttcttcccgaatccgcataaaaatcgtatattccaaattagcagacttctcacgcgcctctagcatatctccttcgatgcgagccaattcctccgtaccaaagcgttctgaatttttcaaggtcgccttgcggaaaaagtgagcaggaacgtgactcaattgagaattggtgacatggaaatagtagccatccttcttgttgtaatcgatttttagacctgtaatgccgctggcttcgcgctccttggcctcaatctcagcaatccaaccagtaccatcccgaagaacgacacggtactggtccaattgctcgtcaaacccagttcggatgatatttccctccgtaataacagcagacgcttccggagcaatagctgaggtaatcaagcggtgcaactcaggaagttcatccaagcgtgcaatcaagacatctaagactggatcaccaatccccagtagaatcgacttgatcgtcggcacatgacccagagtatctcctagctgcaagagatccttagggttgatcttgccaaaggaaacccgactcgctaagcgttcaatgtcatagacccctttgaggctgtcggtcaaatcgctccgttcaaagaaatgatccataaagacctgaatgatgtcctggcgctctcgtatccgtttcaaatcgactaagggtttctgaatccaggaccgcaacaaacgaccgcccatggccgtcttggtttcatccaaataccaatacaagctaccatgtttcttcccagtccgtgcattctctgtcaaatcaagactagccttggtcgcaaagtccatctgcaagaaatcacaaatctcataatgatgggcttttttgaggtggctcaattcccgcatttgtgtctggtggacatactggagaagttttccagccgttttcttttcgagctcactcagatgatcccctaagagttgaacatcgtcgagcgccgtctctacatgtgacagcaagagattcatctggctaacaaacacacgctcttcctgttctggcaacgcataacccaggaccacctcacgcgcacgtaaattgcggatttctccacaaaccatgctaaagtcattgagggtcgtcacctgaaactcccctgtcaccagatccatataggctaacccatactcatttcctgaccgatccaaagcaaccaggaagttattctcactatctggcttggtcgaatccaccactgtacccggcgtaatcacctgtacgacttcacgcttaacgacccccttggcttctttggggtcttccatttgttctgcaatcgcgaccttatacccctgttcaatgagaacatcaatatactgctgggccgagtggtagggaacacccgccatgggaattggattctctgcatttttattccgtgaggttaaggaaatctctaaaatttgagctgcattcactgcatcttcataaaataattcgtaaaaatctcccattcgaaacagcaaaaaggcatccggatagtcttttttgatatctagatactgctgcattccaggggatattttctctactgccatacttctttattccttactgttgcatcattttctgacacaagctccatagatgaaaacaggagtagatagctcactatcttcctccttttgacatcttaacggggtattttctttcttttcaaggggcttgattactgcatcatccctaaaatttcattttgaatttcaatggctgcctcttggtctcgacaaacaatcaagagggtattggcccctgctactgttcccaaaatacgctcatctgacatctcatctacaccattggccaagagagctgcttctcccagctctgtccgcaaaaccaaagtgaactctgctcgtgagacagacttggcatggctggacaacataatataaatctctgccacctcaggctcatttggcaaaatataatacaactggtcttttcgtttcaccttgactagacccagatcgcgcaaatctcgtgacagagttgtttgcgttacagcaatgccttttgcttctaatcgatcctgaatctctttttgagtcgacaatttttcatttcgaatcatttgttgaatcaaaaggtgacgttctgtctttttcattggacctccacttttgaataaatatactttaaattataccaaaaaaattgaaaattcgctcagaattgtgttaaaataatagttaaaaggactaaggagctaatatgaacaataaagaactcattgctagtgaattggccaaagtgattgactctcttgaccaagatgctattttaaatttgcttgaacaaccaaaatcatctgatcttggtgacattgcttttccagccttctcacttgcaaaagtggaacgcaaggctcctcaagcaatcgctgcagatattgctgaaaagatcgaccaaagtgccttcgaaaaagtcgttgcaactggaccttacgtgaacttcttcttagacaaatctaagatctctgatcaggtaatcaaatccgtcatcgaagcaggggcaaactacggtcaacaagacgaaggtcatggccaaaacattaccatcgacctttcaagtccaaatatcgcaaaaccattctcagttggtcacttgcgttcaaccgttatcggggatgctctttcaaacatcttccgcaaaatgggctacaacacgattaaaatcaaccacttgggggactggggtaaacagttcggtctcttgatggtagcctacaaaaaatggggtagcaaggaagctgtcgaagccaacccaatcgatgaattgctaaaactttacgttcggatcaacgctgaaatcgaaaacgatcctgagcttgatgaagaaggacgtctctggttcaagaaactggaagatggagatccagaagcgactgagttgtggcaatggttccgtgacgaaagcttggtagaattcaaccgtatctacaaactcctcggtgttgaatttgacagcttaaacggagaagctttctacaatgacaagatggatgaagctgtccaaattcttgaagaaaaaggcttgttgaaagagtctaagggtgctagcatcgttgagttggatgatgtcaaccttccaccagctatgattaagaaatcagacggtgccactctttacatcacgcgtgatatcgcaaccgctatctaccgtgcacggacttacaactttgtgaaaaacatctatgctgtaggtcaagaacaatccaaccacttccgtcagttgaaagctgttctgaagaaaatgggatttgactggagcgacgatatggttcacgttgactttggtttggtgacaaaaaaccgccaaaaattgtcaactcgtaaaggaaatatcatccttctcgaaccaactcttcaagaagccatctctcgtgccaaagcgcagatcgaagaaaagaatcctgaattggaaaacaaggaagaagtggcacatgcagtcggtgttggtgcggttaaattctacgacttgaagacagaccgccgcaatggttatgacttcgacctcgaagccatggtatcctttgaaggagaaactggaccttacgttcaatatgcttacgctcgtatccaatccatccttcgcaaagccaacttcacaccatctacagatgcaacttacagcttgagcgatcctgaaagctgggaaatcatcaagcttctccaagacttctctcgtgttgtcaaacgtgccgctgaaaactatgatccatccttgatcgcaaaatatgctatcaacttggctcaagccttcaacaaatactatgcacacactcgtatcttggatgaaagcccagaacgcgaaagccgtcttgctcttagctactcaacagcagtagtcttaaaagaagcccttcgcttacttggtgtcgatgcccctgagaaaatgtaatttcttatctatgatggataagtagaacatctcttatgggagtgagaggagaaactaaatgcgattcaatttagttctttctcactccttttctcatgcctaatacccttcattctctacattttcaaatcctttatatacaggagaaatctatgaatcaaaccgtttacatcttaatcctcatcagtttagtggttctctttttatttaacaagtacgaaagagaaaaactacaacggctcttacaagagcaactcttgaaagatcaagctttcaaagatagcatcaaggaaaaaatccaagagaccgacaatatcaacgatgtcatccatgccatcaataaagactatcgattagggctcctacttgctaaagaaatcactgaaaaattaaaataagccatagaagaggagtcatataaaatgtgactcctcttctattcagtcgcaacaaataagaggctgggacaaaagtcctagcctctcaattatttttggattgtcgagcaagacgcagtggttgagtgggctctactacgctgatttcatcagcttttacagccctactcaactgtgcggaggtgggacgacgaaatcgaattctaacgaattaccgatttctgtcccactctctttattttaaagatgatacaactcttctacaatggcagctacttttttaatatctcccaacatcccccgcatttcaaaatcggctaacatagggaaaccaaagcgttggctgtattgcttagcggttaaacaatattgattgttaaaattccgattgcctgatccaaccactcctaagcacttgctggcattgtctccataagcaataaaatccgcgacatctgtcgtcaaaatttccacatcgccattgtcaacaccatttccaccctccaaataggtaggcaaaaaagtgataaaaggattggtcatttcaaagaagggctggccctctttgaccaggtctttcacatgaactttctcgatttcaagtccgggatggacttccagcaaatagtcacttaagcgacggacaaaactctctgtatttccactcagactaatataaacaaaggatactttcatcttttttctccaatcaagaagctctcttatcctctaagagagctccattcaaacttatctattatgccctagcttgagcttttctcaaacgcaaggttttatacaaaacaattccaaggaagagaagagataaagcagtcaagagtaacaaagcaatggacgaagatgccagatatcgttggcgaagggacgggtttgaaaaactagctaatagtggacgccctgcaaaataattatagcaagagaaggattgacttaataaaatctgccccatgtaagtataatgggctgttaacagatcctgcttcataaagaggaaatagaaagttgccagtaaggcaatcagaatcagggaaacaaataaaaaggttagtggagactgattgagttgggctgatttctcataatatgtcacgtagtcagccttgtcttgagccgttgttaaaccaagttgtttcgcaaaatcatctgtcagctcaaaactctttgaagctccaaaggttgagacagctgaagtcagggttccaaccgtagagaaaaataacaggatgtaaagatagataggtttctttttcatacaaactccttttcatttcttacaccctattatatcgcgatacagatagaaaggcaagcgcctcaaaaccgtggaagcacttgcctgatcactgatacgttcaaatgaaattcatttggaaaagtaatgtgtgcaaaagatgaaaagccatcgcaactgtatcattggaatgattagagatataacggagtcctataaactttcattcgaacaccaccagtatacctcattctcttcttcttgtgtcatccatttctattctgcttcatttcgacacgatttggtctataaaagccatttcctctcctcatccaaaaactattctgttctatttctcaactatttggtcatcactccatcaaaaaagccagaagaacttgccttctgactttctttatttagatgaatgaacgacagaaataagaattaatcttcttttttcttgcgtgcaagacccaatccaagcaatccagccatcgcacctgcaagaacagctgcagttgagctttctgtacctgtatttggaagcgtaggtgtttgtggttgcgcaggttgtacaggctgttccggaacttcaggagttggttcggttggaacctctggagttggtggaacgattggtgtaggtggaacaattggtgtaggtgggttgtatggagttggtggagttggaggaactggtgttggtggggttggaatatctgtttccgttaccactttattcttatgccatttcacttcagcttccggtttcaccggattcgtatttggaacgacttcaggagttggtggggttggcgcttttggtggagttggcgcttttggttccttcacatcaactgtgatcacagtgtagttaggttcttttggagccgttggacctttaggttcttctggtttgcttggttctgcaggtagattttccactgtaatcgttggtggagttggagcctttggttctgttggttttgttggctctttcggttcttctcctggctctttaggaagacctacatttgagttgatggcaaaccagtaaaccgttggttgaccagccgcattggcaccattagccgtaaagactaagtgtccatctgacatcttcaagcctgctccaccataatagaggtatggagaagatggattatcccaaccttcaagagttgttgaagattcaccgttaaagacagagccatgttcaatatattggttatctttaaaggaagttacttctttagtagcagcatcataagaaacacttgagtttggaattggaataaatttattatttccaacatttacagactcttggtgttccacgttttcaaatttcttcttaggtgtgaacgtaatttgacctgtagttgcatctactttgtatgatccgataacatcatccttaccttcaaaggtaaattcttctgtaccaatagaatgaacacttcctgaacccgaagcatttacagttaacgcatccgttacttcttccttctcaggggtcgtaccaggaacccatttatctgtctcaacttctacataaccatatttctgagtcacaattttgagagggttgtctgctgaaatggaaacagttgcagtaccaaagtctgcttttcctgttttaaccttcacttcattgttttcaatgctcatggatgaaccatctgcatatggatcccaagttccacgaacagtgttgccatctttatctttggcttctactgtaagggcacgaggtttatctccactatcgacataggatgcacctgtccagtggttgagggagttcaaagcgacaatcgcattgtgctgtgtcaaatcaaacttattgccatcaccatcatagaattcaacatcgacagcaaccttaacaggtttgtcttggtctgttgaagcacccactgtcatggttaccgttggatctgcgttgactgctgcaatccctttgccatcatttgatggaagacttaaaatctcataacggtaaatcacacgtttgattggatgcatatccgtattttcacgcatgctggactgattcaagttatcataagtaacgacaaatttatcgccttctttcacttgaatgtactcagtttcattattggcccaaggactagatgctacaatatctgaagcttccaatttattagaatcatattgatggacattgcttgtatttaaacgagcttgagcatcacgagtaagataagtgctgatgccgtcaatggtgtgagttgcaccaccttcacgttggaaggtcaaatcttgaacagttgaaacatttttaaggtcagcatacgcattgtctgtcatatatttgtcgtatgcttgtttcgcgtccgtatattgttttttggcaacttcgtattcagctaatttcttttgataagcaatataatcattttcgtactgtactttttctacattgtattttgcaagatcagcttcgtattgagccttagcagcatcttcttctgccttcttcgctaccaattgatcataagctgctttatctttatcgtattgcgctttcttagtttggtattcttgtaaatctttatcgtattgcgctttcgctgtattgtaaacagccatttctgcttcatacttagcttttgcttctgcattggccttatctgctgctgctttttctgctactttagcatcgtaggctgcctttttagcattgtactcttctaaagctttatcataagctgcttgttgggttttgtagtcttctacttgtttcttgtaagccgcttctgcttctgcatttctcttttcaatcaatgtgatttcttgagatttcgcttcatactcagctttggcctttttgtagttttcaacgactgtgttgatttcagctgtttgagctttattatctgcttctgctgctgcggtagatggttggactttttcagcttcttctgtaacggtcacaccttctgtagccgcatcagcttttgctttttcaagttctggtgattctacataagtcgtcgtaactgttttatttccttctgtcacagttgtagatgtcaacttagaacttgttgcaacagctgcatcgcttgttgctgtatccgtagtagtcgcttcagttgcaggtgctgttgcttcatctgctttcacttctgctccgtaggtattaacagtagccaatccagcgatggccaatgaaacaacaccaactgataacttacgaattgaaaatttttcctgcttcgaaacatgttcacgatagcttttctttttcaaaactctccttttttgtttaaaaaaatctcactgtagaggcaaaaatatgctacttccagttaacttcattgtatcacaatcaaccatttttatatatttgtcaatttaattttttattttactttaaatatataacaacttgaatccccaaactttccttgccttccccatctttagttgaaaatatatgcaaacgcctgtgaaaaaatcctttattttcaagggtttttaagacactttctctttttataaatttcaccgaaaggctttttaaagggaagtatttttttataccaataaattagatttgaagactgaaataaaaattatgtaattttttccctttaggggttgcaaaattcaaaaaaacaacactttttgcagagtgtccattccctaaactagctccatttcttctcccaaatgagaagtaatgaaaaagaccaaggtcttatggaccttggtctaacaactaatgattagtttaagtgccagatatcttcattgtactgagcgatcgtacggtcagatgagaagaatcctgctttagcaatgtttacgataacttgatccaaccatgcatcacggtcttcgtaatcagccaacatgcgttctttggttacaatgtagtcttccaagtcaagaagagtcatgaaccagtctttgttgatcaattccttgtgaagacgagtcaagcgttccttgttaccaactgcaagaacggcatcgctgataatgaagtctaccaatggtttgatagcttcacgttcatagaagtccgctgatttgtatgctgatttctcatatagatcgattacagtttctgaatcttcaccgaagatgtagatgttgtcacgtccaaccaattcagcgatttccacgtttgctccatccatagtaccaagtgttaacgcaccattcaacatgaatttcatgttaccagtacctgaagcttccttagaagcaagggagatttgctcagaaatatcgctagctggaatcaagtagcttgcagcagtcacgttgtagttttctaccataacgacttgcaagtgtggagctactgctggatcgtttgcaatcacttcagacaagcaaaggatcaagtggataatatcttgtgcaatggtgtaggcaggagctgctttaccaccaaagagaacagtgattgggcgagcagggatatttccagctttgatgtccaagtatttgtggatcacatacaaagcgttcatttgttgacgtttgtattcgtgaagacgtttgatttgggtatcaaagatagaatttggattgatttccacaccttgatggtctttcaagaaacgagccaatttccgtttgttgtgagacttgatgttttccaattttgctttgactgcatctttatcttcataagaaagaaggtcttccaatttagatgcgtcatggtgccagtcacgtccgaggatatcatccaagtagtgtgacaaggttgggttggcatgcatgagccaacgacggaaggtaatcccgtttgttttgttgttgaatttttcagggtaaatatcgtagaaggccttcaactcagaattcttcaagatttctgtatggagagctgcaaccccgtttacactgtatccgtagtggatatccatgtgggccatatgtacgcgatcattctcatcgatgatttgaacagctggatctttgtattcagcacgaacacggcggtccaattcttcaatgattggaactaggtgagggaccacttcttgcaagaactcaagtggccatttttcaagggcttccgcaaggattgtgtggttggtgtatgctgtcatgctgcgtacgatagagatcgcttcatccattccaataccacgttctgtcaaaagacggatcaattcagggatgaccattgatgggtgagtatcattgatttgtacaacagcatagtcagcaaggtcatgcaagttgcttcctttttcgatggcttcgtcgatgatcaattgagcaccatttgataccataaagtattgttggaagatacggagcaattccccttgacggttactatcatctgggtacaagaagagggtcaagttacgagcgatatctgtcttgtcaaagttaataccatcttcaataatagatgaatcaactgaatctaagtcgaacaagcgcaaacggttcttggtatcgatcttgtaaccagggacatcgatatcataaagggtagaagtcaatgtgaagtgtgcgaatggcacttggtagctacggcttgaacgaacgagccagctttggtcagtcaaccatgcgtttggaatcgtttcttgttggttgtttttaaggacttgttggaacaaaccaaagtggtagttcaaaccaaccccatcccctgtcaaaccaaggcttgagatagagtcgataaagcaggctgccaaacgtcccaaaccaccgttaccaagtgatggttccaattccacttcttcgacttcgatcaagtctttaccagcatctgacaattcttttttgacatcgtcgtaaagacccaagttgatcaagttgttagacaagagtttaccaatcaagaactcagctgagatatagtaaacttttttcttaccagtatttaatttcttttgggcacttgcttgcttggtgtaatttagcaaggcaatgtacaattcttcatttgaacattctgcaattgttttttggtgatgatcaatcacatatttttgtaatgattccatgttttaaagtctcctttgtttcaacaattttaatagggaaagattatttttctgctttcttaacttcttttttcaagtctttgttttcacgacgatagatggttgtgaaatcaagcaattcttgctcaacagctggagtcaattgatccgctgtcatccgccatgaccagttaccaccaagagttgatgggaagttcatccgagctgaaccatccaactcaagcaagtcttgcatcgtagaaatcgccatgaagctgacagaagcaaagacggttcgaagcatagcatgtgggacagattcatactctttccggttggtataacgagcaaggtactcacgagttggatcgtcgatttcattgcggtaccatccaagaactgtgttgttatcatgtgttccagtgtacatcacagagttgtttggtgccaagtgagggctatcgatactttcatcgtcaggattgaaggcgaattgaagaatcttcattcctgggaagccagtacgttcgcgaagctcaatgacttcatccgtcataaagccaaggtcctctgcgatgatgttcaaatcaccgagttcttccttcactgctgcaaagagtttgtagccaggacctttgacccatttaccaggtgcggcagtttcagaaccagctgggatttcccagtatgattcgaaaccacggaagtggtcgatccgaacgatgtcatagatcttgaagctttcacgcaagcgttcaatccaccattggtagccatctttgtccattgcttcccagtcatagattgggttcccccaaagttgaccagttgctgagaactcatctggcgggcatcctgcaatgcaagttgcttttccgttttcatctgttttgaagagatgaggattagcccacatgtcgcttgaatcttctgctacatagattggcatatctcccacaatttcaatgtggtggtcgttggcataagctttcaaggccaaccattgttggaagaagaagaattgagttacacgatggtaagtcaatttatcagccaattcttcacggtatttagccaaagcttttggttcacgcgcacgaatagctgcatctggccactctgtccaagctttcaaatcaaagtgttctttaatagccatgtattctgcgaagagctccaaccaagaagcattggcttcacaaaattcttggaattctttttgatcacttgattttaagaaattcgcaactgctttttcaagcaagggacgacgttgttcgaaaacctttgcataatccacttgagtaggatcttgaccaaagtccactcctttaaggtctgcttctgtcaacaaaccttgctcgatcaaaagatcgaaatcaataaaatgagtgttcccagcaaaagctgagaaagattggtatggagaatctccataactagttgtaccaagcggcaagatttgccagtaacgttgcttggtccgaacgaggaaatcaacaaaatcatatgctgattgaccgaatgatccgatcccgtattgtccaggaagggaagaaatgtgcatcaaaacaccactttgacgttttttcatgggttaccacctttttttatttctttgaagcctgcgattcggtgcacggtatgggtatcgttgcagagtcgtatccagctctcaagcggctctactctttgttaaaaatcgaacaggcgcaactcagtttacgcaatttttgcgaaaacgtttgcgtaccatgttattataaactttttccctattttctgcaagggatttcttaaaaacttttttaacttttttcagaatgtcctcacccccttagtgtattctttcctttggctaatgtcaacaaatttgatgcattttatagaagaaagttcggaattaaaatatttttaaaaaaattgtttaaaactacttgcaaacgttttcgccttgtgatatacttaagacgttttaggaaaacgtttgtctaaaacggtttctaattattatctttttttattctttaggaggaataaatcatgaaacgtacaattttacgtagtgctgctgtacttggtacagttggttttgccggcttcttacttgctgcttgtagcaataactcatcaggttcttctgaggcaagtaaagaaatcaacgtctatgtagacaaaggctacaaatcttatgttgaagaagctgcaaaagcttttgaaaaagaaaatggcgtaaaaattaacatcaagactggtgatgctcttggtggattggataacctttctcttgataaccaatctaaaaaagctccagacgttatgatggcaccatacgaccgtgtaggtggtcttggtagcgatggtcaattggctgaagtgacattaaacaaagatagccatacagataaaacaactgaagctcttgtaacaaacggtggtaaagtttacggtgcacctgctgtcatcgaaacattggttctctactataacaaagatcttgtaagcgaagctccaaaaacatttggtgatcttgaaaatcttgcaaaagatagcaagtacgacttcgctagcgaacctggtaaaacaactgccttcttagctgactggacaaacttctactacacttacggtttactttcaggtaacggcggttatgtgtttggtaaagacggtacagatcctaaagatattggattgaacaaccaaggttctatcgatggtatcgaatatgcaaaaacttggtatgctaaatggccaaaaggtttgcaagatacaaaagctgctgctaacttcatccaaacacaattccaagaaggtaaaacagctgctatcatcgatggtccttggaaagctgcttcattgaaagaagctaaagtaaactacggtgtcgcaacgattccaactcttccaaacggaaaacaatactctgcctttggtggtggtaaagcttgggttatccctgcaggtgcgaaaaaccttgatggcgctcaaaaattcattgacttcttgacaagtactgaccaacaaaaagctttgtttgacaagaccaatgaagttcctgccaacacagaagctcgtaaatatgcggttagcaaaaacgatgaattgacaactgccgttgttgatcaattcaagaatgctcaaccaatgccaaatatctcagaaatgagtgctgtttgggatccagctgctactatgcttttcgatgctgtaagtggtaaaaaatctgcaaaagcatctgctgacgatgcagtgaaattgattaaagaaaccatcgaacaaaaattcggtagcaaataagacagtttttaggtgtgagtaagaggttggagacaaagtcccaacctcttatgttcaattttcaagcacaacttactgtctgacttgtcttcttgctctctagcaaggacattataaggagatttgaatgactacagaacaaaaccctaaaaaggctatgtggctctctttgatcccgggtcttgggcaaatttataacaaacaaaaaaccaaaggctatatttttcttgccgtaaccattctctttctcgcctatttcctaggaattggagctggagaattagcgaaattggttacacttggaaccgtccgtggacaagataattctctctttatcttgattcgtggcgccttccacttgatcatcactgttgtttacttcctattttatgccttaaatattaaggatgctggaacagttgctaaacgcatcaacaacgggattgccgttccaaaaaccttgaaagaaatggttcaagccatctatgaaaatggcttcccatatttattgattattccttcatacattgctatgacatttgcgattatcttcccagttttagtaactttgatgatcgcctttaccaactacgacttcaaacataccgctccaacaaccttgcttgattggatcgggttccaaaacttcactaatatgtggaccttgagtaccttccgctcagcctttacatcggttcttggctggaccttgatttgggccctcgcagcttctactcttcaaatcgtactcggtatcttgaccgctattgttgcaaaccaaccattcgtaaaaggaaaacgaatctttggggttatcttcttgcttccttgggctgttccagccttcatcactatcctaactttctcaaatatgtttaacgatagtgtcggtgctatcaatgcacaagttatcccattgtttgcgaagatcttcccattcttagatggcgttttgattccttggaaaacagatcctacctggacaaaaattgctttgattatgatgcaaggttggctcggcttcccttacatctacgtcttgactttagggattcttcaatcgattccaaacgatctttacgaagctgcttatattgatggtgccaacggttggcaaaaattccgcagcatcactttcccaatgattatggctgttgcagctccaactttgatcagtcaatataccttcaactttaataacttctccatcatttacttgtttaacgatgggggacctggttctgtcggaggaaacgccggatctacagatatcttgatctcatggatctacaagttgacaaccaattcttctcctcaatattcaatggctgcagcggtaaccttgattatctctgtgattgtgatctcaatctctatggttgccttcaagaaactacatgcatttgatatggaggatgtataaaatgaaaaattcagttcaatttaaacgccgcctcaatcatttcttgacttacctgtacatggtggttctttcaatcgttatcatttatccattgttgattacggttctatcagccttcaaatcagggaatgtcagtgcctttacacttgattttagtggcaatcttagttttgataacttctcaaaacttttctctgaaacccattatggcacttggtatatgaacaccttggttatcgccattatcaccatgattgtacaaacaagtatcgttaccttcgcaggttacgcatacagccgttacaatttcttggcgcgtaaacaaagtttggtcttcttcttgattattcaaatggtcccaaccatggcagccctcacagccttcttcgttatggctttgatgctgaatgccttgaaccaaccttggttcttgatcttcctttatgttggtggtggtattccaatgaatgcctggttgatgaagggatactttgatactgttccaatttccctcgatgaatctgcgaaattggatggagctggacacttccgtcgcttctggcaaatcgtccttcctcttgttcgtccaatgattgccgttcaagcactttgggctttcatggggcctttcggagactatatcttgtctaaattcttgcttcgtgacgaagtgaactatacggtagccgttggtcttcaaacctttatcagtgaccaaaaaaatcaaaaaatcgccttctttgcagccggtgctattttgatcgcggttccaatctgtatcttattcttcttcctacaaaagaactttgtttcaggcttgacagctggtggagataaaggataaaatagaatcttatttcaagcacattttatttttaagttgagggtagtatggtggatgctttactacccttcgttaagaataaaatcaatgcaaagagatttctctttgcatttctgatactcttatatttagaaaggtcatcttatgccctatccttttaattatttcgcaagtatcttcaatttccgctcttcttttgcaaaccgcaaaaaactgagctggttccaaatgatttttacttctttctttctaatctctatcacactattacctgtggctctgcaaaatgctcaactcaaaacctatcctttgacaacctttgtcagcgatgtgtttgatcctttatcaacagacgttatgaaagatatccaagaacacgtcgtgatcaaagaccaagagctcacctatacagggactaaccctgtacacaagacttcaaaaggacaggttatcttaggccaagaggcaaaggctagtgaaggcaaggagttaacactccattttgatcgcaaacaattgattatctcaaaagagaataaagaactcgctacagtctcataccaggctattaatcaagagagccttcgggataaaaaaagcttcactcaagctatctctagcgattggtttcgcgacaatcgactccctgtcagtctctttctcgtgattttctctggcttcttatcgacagtcaattatttgattctcatcgtaggggcatctttcttcctctacttgacacgaaaatctcgactcttttcactacaaactttcaaggaatgtttcaattgtattctgaattgcttgggactccctattttactgagtgtcttcatcagtttactattccatcaagtatttactacgacgatcatgatccaaaatgtcttatttgtactctatcttgctatggtattttataagacccacttccgtgatccagactatcaccgctaggaggttttctcatgcgtgttaccatcaaagatgtggcgaaactcgctggcgtcgcgccttcaactgtcacgcgcgtcatccaaaacaaatccacgattagtgatgaaacaaaaaaacgtgtccgtgaggccatggtcgaattggactaccatcccaatcttaatgctcgcagccttgtcagccaatctagtcaagtcattgctttggtcctaccaatcgacagtgacgtcttctaccagaatcctttcttcccaactgttttaagagggattacccagatcgcgtcagacaatgattatgccatccaaatctgtacggggcaaaatgaagaacggcggctcgacaacctcaaacaactcatctacggaaatcgtgtagatggtttgattttcctttattccaacccgaatgatcccctcgttgaatttgcgatcaaagacaagttccccttcctcattctcggaaaggcagcttcaccttttgtatcgctagtggataatgataatatcaaggctgcatttgatgcgacggattatttcattcaacaaaactaccgaaaaattgcttttatcgggggaaacaaagaactgttcgtatctcaagaccgctacgaaggttataaagaagccctccaaaaagcagggattcctctcgatgaaaaactcgttcatttttcatttgggtttatgttagaagataattcttatcaaatgatggagagtctaccgttaacagaactagatgcgattatgacgaccgatattctcgttgctgaaggggtgcgccaatacctattagaacaccagctgacaatcccgattatttcctttgattcgatcaagccacgactcgatattgaagcctatattgacatcaatgcggtggaactcgggcgtgaatctgtccggaccatccttcaaatcatcaaagatcacaaagaaggaaaaactgtttgctaccgtcaattgattgaccataccattacgaaactttaggagtctttatgtctacatttactgcttatttagatgaccaagacctcattcgtatccaaaagggagaggagcatatccttcctttttatttgaaaacgaaccaaggttatcttgccttaatccctgtcaaaacgtcaagtgcagcgactgacacaggagactatttcttaagccctattccacttgaactcggagaagagtacaccatctacgatgctactggaatttcttctatactccactatcgaaacatcgttcgcaaacccattttcgatcaaaccttcacctatagtggagaagatttaggaagtttttacacaccaaatcagacgcaatttaaattctgggcaccgatttcgcaagatgtgagtctccatatcgaagatcagatctatccgatgacacgtacagaaaacggtgtctggaaactcttgctcaaaggggattgggaaggagctgcctaccactatgaatttcgtgtcaatggcctagaacgtcggattcacgatccctatgctctatcctctttggccaactctggagacagcttggtcatcgaccggaagaagattacacgtcctatcacacgtgctgctcgtcaattagacccgacagaagcaatcatctacgagatgagcgttcgggacttctctgtccaaaaagaggccggctttaaacaccctggtaagtttaaagggttgacagaatcgcctcaactcaatggtcagatccttggatttgattaccttcaaaaacttggcattacccatgtacagttacttcctgtctatgatttcggtagtgttgatgaagagaatcaatggaaagcctacaactggggttatgatcctgtccaatacaatgttccagaaggtagttatgccagtgaccccaacgatccttatgcacggatttgggaactccaagatgctattgcaacctatcaccaatctaatcttagtgttatcatggatgtggtctacaatcacgtctaccaggccgatgagtatgcatttgaacaaatcgtacccggttatttctaccgctataatgcagaaggagagcggaccaatggaaccttctgtgggaatgatgtcgcaagtgaacgttccatggtaagacactatatcaagcaatccctcaagcaatgggtttccctctacggctttgatggttttcgctttgacttgatgggaatcttagacattcaaaccatgacagagattgcagaggagctccgtgaaatctatcctaaagtctatctctatggcgaagggtggaagatggatacaggcctctctgaagaccagctcgctcaccagtacaactcaaaacgattaccagattttggctttttcagtgataatttccgggatacggtcaagagaacactcttagccgatcaccgtcgtgatagtcaacatccagccaatgatttttctaatatcctaacagcaaatgtcgggaaagtaggacctgctcatttcatccaacctcaacaagccattcagtacgtcgaatgccatgacaatgcaactgtttttgattatttccaacttgaaaaagaagagattcgtctagaggagcgaaaagctctctcacgtctcgctcttcatttggtattattatcccaaggtgtaccttttatccatgctggtcaagaattttaccgcacaaaagggctcgaagacaacacctataacttgccagatagtctcaaccaattggactggacatccctttcaaaatgccaagaagaaattgcttttcttgaagaattgattgcttatcggaaatcacagccactccttcgtttgaaaaaagggcaagagattcgcgactactgtgatgtcaaatggttgtctgatcatcatttgatctacacgattgagaaagatcgtgaaaaaataacgattctcgtcaatatcggtgatcaagaaaagacctatcaacatccgagcgatagccagctgttatttgcctatcctcatgccaacctccaagcgcctattcctaaaggaaaggaactttctattcctgcccatagttggctccttctccacgaaactgaatcaacaaaataaaggtcaccacaatgtggtgaccttatttttattcttctgtttctacaaagcgtccaatgatatgaacgttttctgaaatggtgataaaagcctgaggatcagcttttttcataatatatttgaattcattaaactctgcacgcgtaataactgtcagcagaaccgctttttcctgatggttataggttccttctgcattgtggataatggttgctccacgatgcaattttttatgaatcttttcaataatggcatccggctggctcgttacgatcattgcctgcatccgtttttgcttggtaaagacagcatccgttactcgactcgatacgaagatggtaatcatagagtaaagagcatacttccaaccaaaggtcagaccagcgatcaacataatggtcccattgaccaaaaaggagatactgccgacattctttcctgtccgttttcgaatcgtcaaactgacaatatccgttcccccactggaaatgttgttccgaagagcaaaaccaatccctgttcccatgacaaccccaccaaatagggcattcatgatcggatcgttggtcaacgtaatcactggcacgaactgaataaagagggaactcatcgaaaccgtaataaaggtaaagatggtaaatttatggccaatttgataccaagccacaatcatcaaagggatattgatggcataaaaggtcaaggaaacgggaatcgtaaagccaataaagcgttggctcagaacagataaaatctgagctagccctgttgcaccgctggagtatacatgtcctggttgaaagaagaagttgacggcaatcgctgatagaaaaccatacagcaaggaagctgacactttttcatcgtatttctcacgggagatgctcttcagcacgcgcaataatttaatgttataagctagtcgtcgcacatgatagcgaaatagcttatgaaagcgagtttttttcattttcaatccatcgattagaagaaaaggaaaattttagagcaactgattcctagactttcccttttctctcttgtcctattcttgctctgctacttctacttgaagatttaactcatccaattgcttttcagaaacgacagaaggagcttgtgtcattggatctgtcgccttgttattcttaggaaaggcaatgacttcccgaatattatcttcccctgcaagaagcatcacgaagcggtctaatccaatcgccaatcctccatgtggtgggaaaccataatccattgcttctaacaagaaaccaaattgttcattagcagcttcttttgtaaatccaagcgccttaaacatccgttcttgtaaatctttatgattaatccgtaggcttcctccacctaattcatagccatttaagacgatatcataggcaatcgctcgaacttttgaaagatcgccttccaattcatgctctgtttcagcttgtgggagtgtaaatggatggtgagcagacatataacggccttcttcttcagaccactcaaacattggccaatccactacccaaaggaagttgtattgattgttgtcaatcaagtcaagctctttcgcaagacgaacacgcaaagcaccaagcgttgcattggctacttcaagagtatctgctacaaagaggactagatctttgtcttctaattgtaaagcagctgtcaagtcacttgtcaagtctgtcaagaacttcgcaacaggaccgttcaaagcaccttcagcatattttacccaagcaagaccttttgcaccgtattgcttcgcaacttctgtcaatttatcgatgtctttacgagagtaatgatctgctgccccttttacgacaatcgccttaactgccggagcttctgagaagactttgaagtctacacccttgacaagctctgtcaagtcttggagcaacatttcaaaacgtgtatctggtttatctgaaccatacaaggacatggcatcatcataattcatccgtgggaatgggagtgttacctcaattcccttggtttctttcatgacacgtgcaatcaagccttctgtgatatcttggatttcttgatcactcaagaaagaggtttccaagtcgacctgtgtaaattcaggttgacggtctccccgtaaatcctcatctcggaaacacttcacgatttgataatagcggtcaaatccagcattcatcaacaattgttttgtaatctgaggactttgtggaagggcatagaaatggcctttgttgacacgggaaggaaccaagtagtcacgtgctccttctggagttgacttagaaaggaacggtgtttccacatcaataaactctaattcatctaaataattgcggattgaatgagttacttttgcacggagtttgaggttttccaacatctcaggacgacgaaggtctaagtagcggtaacgaagacgagtatcatcattggcttcaattccgtctttgatttcaaatggcgttgttttggcagtattaagaaccgtaatagcctctaccttaagttctactgctccagttggcaagttcggattcgcttgttcacgagcttccacaagacctgtcacttctacaacatattcactgcggatgctttcagctgtggccatcacttctgcactaactgtttctggattgatcaccaattgcatgattccttcgcggtcgcgtaaatcaataaagatcaaaccacccaaatcacgacgacggctaacccatcctttcaaggtaatacgagttccaatgtgttcttcacgaacacgtccagcatacattgaacgtttcatttctaattaatctccaaactaatattcttccttctattttaccataaagaccagcagaaagtggcctttagctcaactttttcagttaccaacttctttagttatcgtggccaacttcttccttctttttgggatcatcgtagagattgggggctatcaccttcattaaagtcgctgtcccaaatctcaagacagctgctgctagtccaaaaataggggataagtaacggaaaaagaaatctcccctaagtgcgtaggtcatgccacccacaataaaaaagataacaatcccctgaacaattgcgtaaaaccaaatttttttcacactattctccttttcacaaaccagctgacttatccactgttttttatcacttatccacaaaaatgtggataactttcaccttttgccccctcaaaagaggaagcgtcgtcagcatcaggacttgctttcatccatttacaagcaagtttcccacagcctgtggataactctcttgcttatttgtgactttctcgtcactttcctcacaaatcaaggagccaggatttgatcctgccccctttgatcaagcattatttaaattcgtctggtgtccctttatattgggcccagtctttactgaagaagcgatcatttagatggtaagttggtgctttttcagcctttgtgacaaagggattgaccgctttatcaaaggctagccaaccattccatcccatatgaatcgtatcttccataaagtagggctgatcaccatctttagaaaagtctgcaatattggtgaatccttgactttccaattggtaacgaatcttttgaacagcctgttcatacttttcttggctcaagcctgtgtatttcatccatttggcattgactggaggaatgacaaagataacattggtccgagatttagcaaactggtctagaaccaactgcaagtcattgtactcaggagattgaacataggattcgtttttttggaaaccttttagtttcttcaacttcatttttaaacgggtattgtaaaaatgattactgatcccaaggtcgttgttattggttttgacttttgcttcagccgttgcaatttcttccaatttctcatatgagaattgatctggtaaatcttgtagacgttttttaaccttctgatcataattcccatttgtacgcgttgcaagattactaaacaaagcatcttcgcgttggacaaggtgggaaacaaactggttcaaagactgatcaaatccggaaattttctttccttgagaaattttcgttacaacactttgaaaagcgacgtttggatactgttgtaatagacgctttgcagcatactgggatgcagcatcctgttggtgattggcaataaagctattcaactgatcgctattaaagaattgttgaaaggcagaggaatcatagcccttcttggtgaaccattgcggagaaactacataaacagctgtattgtccttgagttctggcaaaatctgttgcatcccaaaatactggttcaaagaagccgcaccacgttctcctaaaaagtagggtctataattgcggtcatatttttcagccaaaactgctggatgcaccacatcaaaacgcaaccattcactggagccgaaataaggcacaaagcgatgctgtggatcagaaagtgcttcttgtttctttgtacgactcttgaatccttctgcattcagactaaccgcagcttttttctcttcggtatagttgtgcttatgattgattggataaaagaataataaagctgttaccatgaggagcgcgcaaaatacgggccctaaaatcagccacaaacgcttaagcattctgaagctccgttacaccttctacgatcttgttagcagtattccaatcatcgcgtccaaattcagatacaggaacacggatgccaaagcgattttccaattccacaatcaattcgactgttcccatactatcaaggacacccgcatcaaagagatcctcatccatcatgtctgagacatcttccataaacaattcgtcaataatttcaattacttgtgattttacatccatttttctattctccttttatttcaattttggaaaccattgttgatccaagaatcctgagaaaatcaggaaggacagcatcactgtgttaaaggtgataaagatccctaaagctttggtccaacgattatccggtataggatccaatccttttgcttttctttctttattaatggtctttttcttacgaatccaagcatcattgataaccagtccaagcccatggaagagcccgtaagcgatgtagtaccaggtcaccccgtgccagaagcccatgaccaacatattgataatataggcaacatttgaggtggtaatccggctcttgaatactttattgcgcatcaataccatcacgagacgcataaagacaaaatcacggaaccagaaagataaactcatatgccaacgattccagaattcctttaagtcacgtgatttaaagggacgatcaaagttgatgggacttttaattcccatcaaattggaagctgctaaagcaaacatcgaatagcccgcgaagtcaaagaagagatcaaaaccataaacatacatgactcccagcgttccgatattgaagaatccaccttgagacaaggcataggtctgcacatgacctaacaataagtggccaaaaatatgagctaggataaatttataaaggaagccatacatgatatacttaacagcttgctccaacatatccaataattcttcacgctcaggaatagcgttataatcctcattaaaacgcttgaaacgatcaatcggcccacttgagaaggtcggcataaagagcataaagcgtaagaattcccagagtgtgaattctttcaagacaccatctcgcatttcgatgatcattccgacagcccggaaggttaaatacgaaatccctaaaaatccaaacaaggattggtgcccgttcttgatcgctggctctaccttaacaaagatcaggggcaagacagacaagaaagaatgaagatagaaaatccacttattgtccgctttttgacgatagatcttgtaggaatacacaatcaagatttgccagactacgtaaaagagcagggcataaatttgcttgagattcgaacctgtcagcatcaaaatgataaagatcagactcaccagtccttcatataccggaaatctctttttgaaaaagaggcccacaaagatcggcaaaaaagctagaatgaggtagataaaatagatcggtgttccatagtgttctaaatgagggagctgtttcaaaaactcgatcatcggttgttaacctcgctaatcaaccctttgatgtcgattttcccgtttggtgttaatggcaggctgtcacgatagaggaattttgaaggcatcatataagacatcatgatgttttctaaatcttccttaatggctttcgtgatatcaatttcgcgctcaaattgttctttgacaccctcttttaagatgacataggccaagagattttggaccttgtgatctttattataacgcggtactgcgactgctgagtcaatatacttcgatttattcaagttttgagagacatcctctagctcgatacgataaccgttaaacttgatttggaagtccatccgtccaccatagagaaggagaccttcatccgtcatggttccgacatctcccgtatggtaggctggaagaccttcaaattcgaagaaagcttctgctgttttctctggattattcatataaccttttgaaacggctgggccagatacgatgatctccccttgctcaccatttggcaatttgtttcctgcctcatcaatgatgaaggttggagaatcttctttggtgtaaccaattggcagacgtttcaaagtcgctaacatctcatctgttacggctacagccgaaagagctacagttgcttccgttgggccgtaggcattgatgatgcgtgcatttgggaaacgctcgcgcaatttctgagcggttttcacggtcaactcttccccatcaaagtagaaatgggtgattcctggcatcttttcagcattgaaatcttcagataacatagccatatctgcgaaagatggtgttgaagtccagatcgcaatcggaagagaaaagatggtcgcaaagagttgtttgaagtcttgagtgatagctgatggaagagcaaaaagggttccaccaagagccaaggtcggtgcccagtacatgacagacaagtcaaaggaatagggcggttgcgccaacatttgcggacgctctggcgttgcaaattccttgtccgtaatcatccagttggtaaagctgagcaagttatcgtgcgaaatttgcaccccttttggtttcccagttgtccctgaggtaaagatgatgtagtagttatcatcccctttgaccggatgtttcaagtcataggcatgctgagccgcataagcttcacgcacttgctccaaagacatgattggagcagctgggttttccaatggaaattcattgatggcaataatcaagcttggctctgctacttcaacaatggcagacacgcgctccaaggcagagtggctatcaattgggatataggcatggccagattttgtcaaggccacaaaggttgctaacatttcatattcttgaccaccaaagaccactacaggtgacttttcaggaagtcccatttggtcgatgtgggcagccaagctatctgaatcagctttcaattggccataggtatgttcctcaccaaggacattgtaaaccggatagtctggttgtagttgcgcataacgttcaattgtctcgatcatatcagtaattggttggtttgacacggctaggagtctccttttctaaaattcgttgtagataaagccaccctgaccttgaccaaggtaactaaagaaataaagtagggctagaaaaatggcgaaatacaagaccgtctgcccgataaatttataaagtgttttatgtttcataagtttcactcttcattttgattgttattcactattttaccattttttataccaagtaagcaattttaaacatagtgagaatgtcgtagaaaacgttatcatttcagatcattcaattcgtttaacgaaagcatttttctttaatcagttttctggttgaaatcctattctatttcacagtcccctgatgaatcaactccagacacttgtccagatccacatctctctcgaaatggctaggtgtccaaggaatctctatatcgggtagaacaccctgatccgtcattcctttcccttgatccacgcttaaacagcgagaagtgggaaacattaaacaaaaattatcataatcaaccgtacaacaattagagtagtctagaattccgagagttggtcgacccaccaccgttaccttcttaaactgcttcatcatctgaacaaagttatccccagatgaagcacaataaatatctgataaaataaagatctgttcaggatagtggcctcctctaacctctgggaagaattcctcgctttcttccttatatgttacatagccttttccccgatggcggagcaaatcctctttcatatcttcaagcagcttaactgtttcagggctaatttcttcctgttgcatccagtcctcaaagtctttcaagcgcaggtcaacattgcgctctgtgtagagaatttccatgccatcatcatcccagtcaagcgaatcatagccctgatccttctctaaggctagatgtaatagagggaaatataaagaatccgtccctccactgttgcgtcggacatcaatgataagaaacttgacttccgtcatcgtcggtaaacactcttggtataaacgacccaaagatccttcatccataaagttatccagacgaagataaagaatctcatcgtctaatcgtttccaaaaaatctgatcttggatcggttctcgactagggactacttcaatggtcttttctatcccttctcgaagcagggtgacactcgttgactgagagaccaaatccgcccattctcggtagtgtctttcaggggtcttactgataaaatagtctttatgaagagaagctatctgatccaagtcacttccatccaaacctaggatctgatctcctacttgaagacccgtatcttcattagcttcctcaacatacagtttctgtccgtttattctcaaaagaaacccttttggactggcctttttatctcgaaaggaaacatgcccgatcaccccaaaactagctaggtaagtcttaacttgatagagaaaggcatcatctgtcatatcatctgtaatgttttctcgaaaaggctctagatcgcatccttttcgatccttgatggtagatgaatcatgggtcataatagagacgacatcttcaaaaatagcagtctttttcataagggattccttcaattttttagaaacagtataccactttttcttaaaaagttcttaaaatcctaaaaaactatcctaaagtaggatagccgttatagattctttcttttcttcgctttctttgtcagagcgacatcacaattttcaatcttgctaatcaatagattggcaagagcaaaatcatcgatgttcgatttcatatttacctcgtagttcaaggtcagttgttctccagcttggaccgttgtgacagaaataaagtcaatttctgaacaactttggtccaacaactgactgatttgttctgcaacagaatcttgttctgagacggtaatagtcaaatggcggcgccgttgatggtctgccttactctgtttgttctctaataccagccacacccctagtaaagagagagttgataaaatggccaataaaagatagcccgaacctgcagccaatcctataatcatagctaagaaaatggcaatcaactctctcgaaccactcgtagccgaacgaaaacggatcaaactaaaggtccctgccactgcaatcgaggttcccaaacttccattgaccaaaaagatcactaaggtcatcatacaaggaagcaaggtcaaactaatgacaaactctcgagtgtaaagtgttcggtatttataggtccaagatagggccagccctagaaagaggctgaccaaaagggccagcagtaagcgcaagggatccaccgctgctgtggcattattaaaaatagaatcaaatagattagacataggcagcacctaccgtttcttgaactggtcttggggcataatccaagccttgtgatttatgataagcacagctatattttgaaaatttctgtttcaccaaaccatacttctctaaaatatcctttagccatttaggttcttggccaggagccttaatttccatgatcacgaagtcatcctctagtagaggttctcctttcttcccaccaaaaaggctaacagcctggtctcgaaagactaagttttgatcgattgtcacgcgaatcttctgataaggataaccctgaatggatttcttttctttgagagacaaacgatcataataaatgaacatccgtggttccaatcgatgaccataacgtttgcgcaatctctgaatctcttgcactaagtctggatcttgtatctgatgatctactgtcccatctgtcatcaagttgataatggcttgcgaagtagcgactaggcggaatttatggccaattccttcttcatcttttgacttcacctctagaaacactgggctgtctgcttgaggtttttctatataagtccgcatccgaattttttcacggcggtgttgttttgcaagagcatcttgaatgacatcaaaattttccgtatcaaaataaatgtttgaaatggttgaggttgggtaatcatcttctacgacgtattcttttaagtctttgatcaagtccttcacgtcatcttttgcgacgatatattttgtttcgattcgtttgaaacttgtctcaattgtttttttcatgtttcttctcctttaagagggatctattgtttctaaccttcagtaagtatgaatacgacttacgtgctttctagtttaatgggactttcttaactggtcattaagccaaacttaaagaaaactaaagttaaggttcctttcagaaaaactttaggaaactttcagctagcaactttagactaggagcatatcaattgaacgagaggaaaagctcatgaaatcaaacaaatggaaatttttattaacgggggccgcaaccctcaccttactgacagcttgcacccaggcgtcatcacaatcagctacaaaaagcaatactgcacaaactaccgctacttctacttcaaaaaataaaacaaacaattccaactattttacagataagtacaaggacagctcttacgatgaaagcaaagcctctactgtaaaactgtctggatcttctgcaagtgtatcaggtgacggcgtagctgtatctggatccaccgtgaccatctcaaaggctggaacctatgtcatctctggtgaatccgatggggttcaaatcaaggtcgaagcaggtgactcagatgatgttcacatcgtcttgaaaggcgttaccatgaccaacaccaactcaccaatctctgctacaaaagcaggacatgtctacctcactttagcagatggcacgaccaataccttatctgattcaagttcaaacaatgatgaagatgccgatgcagtgatcttctctaaaggcgacctcaccatcaatggttcaggtacgctcaacattgatgccaagaagaacaacggtatcaaagccaatgacaccctccacatcacaggtggaacctataaaatcacggctgtaggagatgccttcaacgtcaatgacgaactcaatatcactggcacgaccatgagcatcgatgcagatgaagatgccgtcaaggtggataatgatgaagatacttctgttggaaccatgtatctgtctgacaataccatgaccatttcagctggggacgatggaatccatgcttctggtgatctgatcatcgatagcggaacctatgaggtaaccgaatctgtcgaaggtctcgaaggaaaatcgatcaccatcaacggtggtgatataaccatctatgcaaccgatgatggtgttaatgcagccaatgctaatgccaaccaagatgaaattttcttcactatgaatggtggaaccctcaacgttgaagttggccaaggcgataccgatccaattgattcgaatggaaatatcactgttaccggaggaaccattaaattaacgggtcaatctggattcgactttgatggtactgctacctacactggtggagacatctatatcaacggtgaaaaacaaacggaaattgtcaactccatgcctggaggcggtggggccccaggcggtggcggacctcaaggcggtggacctggaggcgggcatccataataacaaacaaaggcaggatttcttcctgacctttttttgttgccttttttatgatagaatagaaattcaatcagcttatcgaaaggaacatgatgaaaaaacaaacactccctcttttcttcacactcttgctgtctcttctttttctatcagcctgtgtgccggaccttaagatcaactttaaaaaagtacccactgctaccagctcaaaaaagaaaacctataaaaaaagtagctcgagtcgttctagcctcccgagtcgctcaaccagttcaaatagctcaagcaactcctctagctctccctcaaccactacacagccctcttcggacatcgtcacaaccgaaggactccctagaaatgctcaagaagcacccaaagataaaatttatgcgacagggaacttaaaagtagcctactctagaaatgacgataaaatttttgcacagacgccggattatgaaggatataccacctctcttgtccaaacaattcttggaaatccagagaaacaaataacagaccctgcttatattgccgaatcttttgaaaataccgaattagaaaatattaaagggctctaccacgaggggaaaatcacagaggaacaagctcatgcctttttgatgggagctgttgatctcaaacaagcgtctaaattcggagtaaactacaccatttacacctataaaaacaacactatccaactggtctttgaaaacgaccaacttctctatattactccaaatcctgatgtcgtcttctttaaataatttacattctcgcttagacaagcgagaatttttgtttcacatgaaacaaaaaactcccaacacattctgttgggagttcccgaagattagtcctcttcatattgttttggattatagaaccacattcctagccctgcaaaaagagcaatagtcatcagaaggaaggccacttgatttccaatttctcctgtcatcgaaatcgtttgacgaagaccagaaacggtatagctcattggcaagaatggatgaatggcttggaaaaagccatttgtcaaagcaagaggataggttcctgcactagaagccaattgcaagagcaagaggatcaaggaaaggaaagcaccgatctttctttgccatgttgtcaaagcagtcacgatagacatgaaggccacactaccaatcacacaaaggaagagagtagccatctcatgattagctgataaaccaatcaagtgaacggcaccatagaccaagactcctgcaatcaccgcaatcgttccgttgacctcaaagcgagatttaaaccatgcccagcgactttcagggtgactgccggatggtaattttgcaaagatcatgttggttgacaaggcacaaacaaagagtgctacagagatcatataaggagccattccgacaccattcaccgggacattgtcacggtctgttttagacatagtgactggatttgctaaggttttagcgttttctttttcagttgtagccacattcaattgtcccttagcatcgtttaatccttgactcaaggtttggcttcctgttgctaattcacctaaaccatttgtcaatgtttggccacctgctgctaatttgctggatccatctgagatttgatttgcaccgtcggctagtttatcagcaccagtcaccaattgacctgatttttctgtcaactgattgacaccagtgacaagtttgttgacaccacctgccaactctggagttttgctgttcaattgtcctacaccgtcagctaattttccagcaccggcaaccaattcacccgacttacctgttaattgagtcgctcctgaagccagttgattcatgcctgatgtcaaggcaggcatcttcccatttaactcacctagaccagaagctaattgattgcttcctgcaagtaattctgatgatttactatctagttggccaacacctgctgctaactgactagcaccatccgttaaagtgctactattggtctgaagttgggttgctccattagcgattttatcgacacctgctgtataagcgtcgatcccctgactgatggtttgactagctgctaacaattgtccactaactgcggattggatcttagacaaaccacttgacaagtctgtcaaggtagaagaagctgtcggtaaaacttgattggctgccgtttgcagttgtgtcaagctatttcctgtattcaaactaccttggatcgtttgaatcgtagtcaagatcccttgagccgccgtttcactcgagcttgggctcgatgagatcgccgcattgatttccgcttgttggtcagctgtcattgcttgataggctgctgtcccttgtacacttgcaagggcatttgcacgatccgcttgggctgaagcaaggattgattgagctgaattcgcaatactcgtcaatccagacgaaagttgactggtatctactgaagcattttgaatcgctgcatttaattggtttaaaccagctgccaattgatcaatctgagcagattgacttgtagaagcttgtagctggcttgataatgtttgaatacctgattctaattgtgaaaccccatttcgaagggtagcagattgactacttaattgacccgctccttctgataaagtagcgactccatttgtataggttgctaaaccatttgaaaagttagataggcctgaattcaattgacgcacgccattggtataattcccaagaccatcattgagggtccccataccactggttaattgaccaactcctgaagctaactgaggggtttgactcgccatttgattgagaccatttcctaatcgatccactccggtagcgtaagccatcaagcctgtattaaaagtaccaaacccattatttaattgattgacgccagataccaagtttggaagttgaccagccatttgattgagaccatttcctaattgaccaacaccatctgtataggctgctagacccgtacgaagagtagtcgcaccatctgaaaatgctaagcttgaacgagccaatgtattcaaattagtagacagtgtttgaccaccatcttccaatttacttgcaccatctgctaatttagcacttccatctgccgctgtccccataccagatttaagcgatcccattttggaaaataaagctgttgtatacgtattggtcactttttcggccactgactgcttcatctttgtcatcgcagtgtcgctcattttccctgcgataaaactatgaccactggatgtttggtaatcaatggtcatctgttccggatgattggttaagatggagctagctttctttgaaagatcctcaggcagggttacaatcatataataatcgccatttttaagaccatctttcgcagctttctcatctacaaaatgaaaatcaagtgagtcattgtccttcaaattggacaccatgtcttttcctatttccatcttttgtccattatatgtagcagattgatccttattgacaaccgctacaggaagatccgaaacttggccatatggatcccacatggaagatagaaaaataatattataaagagctggaatcaaagcaactccaatcatgacaatgataaatgttggctttttaagaatagccttccattctttcatcatattttttgtctcctttttatacacattgtctaaatttctgatataatagattatacagtttctagaaattttcacaagtaggaaatctttatttttagacactgtgtataattttgtgcaaaaaggattaacagatgactgagagcaataaacgattaaaaacaaaacgaaatatcgaggaggcgatggttcgactactagaaaaggaatcattcgaccaaatcacaacggttgagttagcacaagaatccggcattagtcgctctagcttttatacccactatcgagacaagtacgatatgatcgagcgctaccaacaagcactctttcacaagcttgaatatatctttgacaaacaccaagacgacaagcgccaagcgattacagaagtgttcgaattcctaaccaaggagccactctttgcagttcttctgacagagaatggaaccaaagagatccaaaccttcttacgacataaattacagattcttctggttgatagtttgcaagagcgctatagtcataaatcattaacagatattgaaagagtctacagttctgtctatctgaccaatgccttcttcggagtctgtcagatgtgggtttcgcgcggaaaaaaagaaagtcctcaacaaatggctgaatttttaatgaaaatgttacggtaacagtctctcctgatcgatctagatcaggagtttttttattagcaggtttaggttttaagaaaacaaaaaggggagcaaagccagaaatcaaccctttaagacaaaacaaaaagcccactgtagtaggctttctgcaaagtatatcttaaaattaaagcattttgttgtagaattcaacgacaagtgcttcgttgatttctgggttgatttcatcgcgttctggaaggcgagtcaatgaaccttcaagtttgtcagcatcgaatgatacgaatgctggacgtccaactgtagcttcaacagcttcaaggatagctggaaccttagctgatttttcgcgaactgagatcacttgacctggagttacgcggtatgaagggatatcaacgcgttttccgtcaacaaggatgtgaccgtggttaacgaattgacgagcttgacgacgagtagtcgcaagtccaagacggtaaacaacgttatccaaacgacgttccaaaagaagcatgaagttgaaaccgacagttccttctttaactttagtagcttgtacgaacaagttacggaattgtttttcaccaagtccgtaagagaaacgaagtttttgtttttcagctaattgcaaaccgtattctgacaattttgaacggttgtttggtccgtgttgacctggtacgtagttacgacgtgccaattctttacctgtacctgtaagtgacaagccaagacggcgagattgtttccaagatggtcctgtataacgtgacatttgaaatgtcctcctataaaaataatttttgtaggaaataacgttttagacaaacctgattcgttcagaacgccttcgcccaaacagcaaaggttacttttctagctggcttcctgttgacgagcttcattttgtcctgctgtcatttcgcacaaattctattctatcacggaatagaaactttgtaaagtccttcaaaacaatttcaatgaaattcagacaataattctatgattcgttttttatattgcaattgttgccagtctctatccgttgctggatcccattttaaaggaagatctgcaataatttcaccgggattatgatttaagatatagatccggtcactcaatgtcaaagcttcttcgatactatgagtgatcactagagtggtgagaccaagacgttccttactgtctagataccagtgataaagatcctgccttgtcaattcatctaaggcactaaaagcttcatctaataggaagacagaatgacccagaagataggttctcaatagcgccacccgttgccgcatccccccactcagggcattgggataaaggttggcaatacttcccaatttaaattcatctaacaattttagagctgtagatgttgcctcttccttaggaatcttttttaattgaaggggaagaataatatttcccaatactgtcttatgttctaacaaaagatccttttgtagcatatagctgacttttccaaaggagatcggggcatcatctacttctatagcgcccttttgtaagggaaagatcccagcaattaaattaaacaaggttgatttccctaccccacttggacctagaatagagacgatttctcctttttgcacttctagtgatacattgtttaaaactgctttatctccaaaagagaaacttacatcttttacggttaaaatatcagtcacctaccaattcatttgtaaaacctttgtcttctaagtcatttgaaaccaatccttgctcttttgcccaagcataaaaagcattccaacgcttggagtcaaactgcccccatttatccttgtctgaagcatattgactggaaagatatttttgagaagctagtacaaaatcacgctggttagccaaagcaggggcctgtttaatcaagatatctgctgcttcttctggatgctctatagcatattggtagccttttttcaccgcttgaatgaatttctttgcttcctctttatgagacttcaaatagtcattgttagcaataataacaggcgaatagtagtcaaatgcaggaacaaaatctttcatatagaagaaattggtcttcattcccttttgctcagccaaaattccatcccaaccgtgataaatccaagcagcatcaaagaccttattttcaatcggagtaatggaatttgaatcactatttggaaccaattttacttgattaaaataagccccctcttttttcatcatcgatttgatcatttccaactcaatcggatcattccaggtaccatacttcttaccaaccaaatcttttggacttgtgatcgctgcatcttttcttgaaataatccctgacgtattgtgttcgacgatagctgcaacagcggtaatccccgcacctttatccaatttcttggccatagaatcttggaaataaataccaaatggagctttcccattaataatcaaatcagaactactgtcttccggcggaagttttatatctacatccagtcctgcatctttaaaataccctttttcctttgctacatagagacccgtatgattggtattcggggtccaatctagaataaaatcaatctttttcaaaccacttgacgattgcttgacagaattttgacaagcactcaagaaaacaaatcccaatattattgagaaaaataaacctattgactttttcattagctatacctcttttacatttttgtcaatttaatttttacaccatttacaagtttgtcaatcctttttccattttagaatggttcgttctaattggtcaacgagaaacataccgagtaaactaatagcagaaatcaatacaatgatcgcaaacatcgtatcatactgaaataacttcttcgattggatcatatagacccccaatccatcaaaacctcctaaccattctgaaactaccgtactgataaaagcataggaaacgctcacacgtaaacctgcaaaaaaataaggaagcgctgcaggaattttataatgagctaaggtctgaaagctgttggcttgcataatctgaaacaatctcagaatatcttgatcgcaatgccgaaaaccatctaacagactgactacgatgggaaataccaccgtaataatgatcaaaaccagttttggaagcataccataaccaaaccaaagaaccaggataggggccaaggcaatcgtcggaatggtttgaataacaaccataaaaggatagaccagatcattcacccattgaaaactatccatgagaatcgcaaatccagcagcaagaagaatccctataacaagtccgatcaaggccacttgaagggtagataaactgtgatgtatcaggagagctcgatctcgtacaaaagcattcccaatttcaagtggcgttggtaatacaaatttggggaggatatttaaaaatcctgctaactgccataagacaagaagactgctaaaacctgcaaatcctatcaattgttttgaatatctttttacaagagacatcgtaacctcctttctcacaaataaaaaacgcctccaaaataggagacggattgcacaaggtcactcataacgaaaaatacatttcatttgtttcctacgctggcattacccagatcaggtgcggtcgaagcttacacttcctctcagactgtacacagactcccatatgtatttattataataactgattttgacgataaaagcaagaaattaatccaaataacgaattaaattcttctctgtcaaaatatctgaataggtgtaagactccacgtaggtattggccggttcacctggtaagctattgtcgttcgtatactcgataataaataaagaaggatagacctcaatcaagcgtccaaatttatttttttgacgtttccgtccattttcaagcgtcatttcaaccacttgtccttcatgggccttaatttcttccttaatttttttcatttttgcaacatctgtaaatgcatcactcatcttattgatcctctctctttgaaatacttgagaatttattatattccttttggaatattaattcgactgtcccacgcgcacctgaacggtttttctcgataatcacttcaaccgtattattaggcattccgtcttcttcctcttcaccagctcgatcataataatcatcacggtacaagaaagcaacaatatccgcatcctgttcaatcgatccagattcacgaatatcagaaagaaccggacgtttatcttggcgctgttccacaccacgtgatagctgactcaaagcaatgacgggaacttttagttccttagccaaaatttttaactgacgagaaatttctgaaacttcctgttgacggttttctcttccagtccctgtaatcagctgcaggtagtcaatcagaataagaccgagattccctgtttcctgcgctaattttcttgctctcgaacgaatctcagtgatccgaattcccggagtatcatcaatgtaaatactcgcattggccaaattcccttgagcaatagcatattttcgccactcttcatccgtcaattgacctgtacgaatcgaatgggattcaatcaaaccttcagctgctaacatccggtcaaccaaactttcagcacccatttctaatgagaaaatagccactgtcttatccaactttgtcccgatattttgagcaatattgagagcaaaggctgttttccctactgcaggacgagccgctaaaataatcaactcttcctcatgtagccccgtcgtcatatggtccaaatcgcgatagcctgtcgcaatacccgtaatatcagaggtttgaagcgatcgggcttctaagctaccaaaatttatattcaagatgtctcgaatatttttaaatccactacgatttgcgttttcactaacatcaatcagagctttttcagcacccgcaatgatttcatctgaaggacttgcaccatcataagcttgattaatactttccgttaatcgagagatcaatcgacgtaagacagctttttcggcaacaatcttcgcgtaatactccgcgttagctgaagttggtaccgaattaatgacttctaccaaataggagagaccgccaatattttggagatccccctgactatctaaaatatttcgaacagtcgtcgcatcaatcgcatccccgcggtcagctagatcgatcatggctttaaaaatcaaacggtgcgagtacttaaagaaatcgccaggctcgatatattcacgaacaaagaccaatttcccctcatcaataaagatggctcccaacactgattgctccgcttggatatcctgaggttgtgttcgtaattcctctatctcagccataaaaaaacctttctatcgatcgtgtttacccttcgtttacacgaatattaatcacacctgtaacatcttgataaatttttacagggacgtcaatcaaacctgttgaacgaattggagaggaaacttggatatgacgtttatcaattttaatgccaaattgtttctcaagctcttctgcaatctttttattggtaatagagccgaaagtacggccatctggcccaattttttccgtgaattgaacaacagttgcttcttcttctaattttgctttaatcttttgcgcttctgctaacaattcagcatgcgctttttcttctgacttttgctttccacgaagctcaccgattgcttgggcattggcttctttcgcaagatttttcttgatcaaaaagttttgtgcataaccagtaggcacttctttaatttcgccttttttacctttaccttttacatccgctaagaaaataactttcattctacattctccttttcaatagttacttcgttttcaatcgtctcaatcagttgttgacgaatactcatcaaatcttgaccctcaatttgagaggctgccgagttgaaatgacctcctccgccaagctgttccatgatacgctgtacattgactttgcttcgacttcgtgcagaaatcgagacagtcccactttgattacaagcaatgacaaaggttgcttccacctcagacatggctagcatactatcagctgctttactaatagttactgaatcataggctttagttgtattggcacaagctacgatgatatgtggcaaaatcttttcaccagtcaagatcagttcgttcacttcgcggtactcgtcaaactgaatagcagagatctcctggatagctacactatcactacctcttgagcgaaggtagctcgccacatcaaaggtccgacttgtaacacgtgtggagaagttcttagtatccagcatgatcccagccatcaagacactagcttgaatcttcgtcaaccgatttttcttcgatttctggaactgaatcagttcactaaccaattcactcgcactacttgctccactttcaatataggtgatcagaacattttcagggaaatcatcatcccgacgatgatggtcaatgacaataatctgttgaaattcctgataaaactctttagaaagggttaaggctgtcttagaatggtcaaccataattaacaaagagcgatccgtcaccatttgcatggcttcctctaggggaaggattttcgtcacctgctcttcttctagtttcgcaattgcccttgaaatatcactagccattgcatgcgggtcatagaccacataagaggaagccaaaatattgctagagaaaaactgcattcccacagacgctcctaaagcatccatatccaagtttctatgcccaacaatgaaaacttgatcaacggatttaatcttatccgaaatagctgtcatcatagcgcgtgtgcgagtccgagtccgcttcacagccgaagcagttcccccaccaaagaaaatagggtttttctgttcatcattttccttgacaaccgcttgatccccaccacgaacttccgcaaggtttaggttcaagagagccactttaccaatctcatcatgctctccatcaccgtacgagaatcccatacttaaggtaataggtagctcacgatttttagcttcttcacggaattgatcgatgactgaaaattttgattccatcaactgttctaagaccgtgtagtctgtaaacaaatagaaacgatccatccccacacgtctgtaaaacatatggtaatgagctgtaaactcttctacaaagttggcaataaaactattgatattactaatatcagagtctgaaatgacatcttctagatcatcatagttatcaacagaaataataccgataacgggacgagttgtcaccaatcccacagttgcttcatactcacttgaaacatcaaaaaagtaaacaacactagatgcctgatcaaagtaaacagaatatttcttatcggctacagtgacataatgacctttatcctcaaacagagtattgagtaactttttcaatgattcaacatcaaagtccccatcatctgttgaaaaaatcaattcagcataagggttgaaccactctacttcatttgtctcttcattaattttgataactccaacaggcattttatcaaggagggatgctaatccgctttctgcctgatggttaacatattgtatttgttctaattcatctaactctgaaatttgtaactggtattcaaataaagcaatcaatccagctaagactaaaagaattgcaatgagagttacatagcctttgccaaatattcttaaaaaaattgctaaaattgcaaatgaaataaaaccaattaacacataatggatgaacgataaacgaaattttttcatcataaacctcttctcggaattataccataaatagaggtaaaaagcgaggtttctctctatattacagagaagatcgacctgtaaaaagctctccctccgcttcactactttgtaaacaaggtttacaactgtgtaaatagtaacaacagatttcaatccataaaattgaggctgaaacatcatctcagccccatttgattagtggtttgctttgtttttggagatactacgagatttaccttccaagtaaaccattaaaatagagatatccgctggattgacacctgagatacgacttgcttgaccaatcgtttctggattaattaatttaaatttttgacgcgcttcggttgcaatagagtcaatatcatcccagtcaatattcgcaggaattcgtttttcttccatacgcttcattttttcgacttggtccattgcttttgaaatatagccttcgtatttaatttcagtttcaatcaattcaatgattttatcatccagttcttcagctgcaggaccgataaattctaccacatcttggtaagagacttctggtcgtctcaagaattctttagcagtgacagcatctgtcaatggtttaaagcccattgcagcaaccttctcattggtttcctttacaggctttaacttaatgctatccaaacgcttcatctcattttcaaactgatacttcttggtttcgaaacgttgccaacgttcatcatctaccaatccaattgctcgtcccatttctgtcaagcgcatatcggcattatcatgacgcaaaatcagacggtattctgcacggcttgttaacaaacgatacggttcgatcgttccttttgtgaccaaatcatcgatcatgaccccaatataaccatcactgcgtttcaaaatgagttccggttttccttggatttttagagccgcattgatccctgcaataatcccttgaccagctgcctcctcatagccagacgttccattggtttggccagctgtaaagagacctgaaattttcttggtttccaaagttgcgcgcaattgatgaggcaaaaccatatcatactcaatcgcataaccggttcgcatcatctcagcattttccaatcccttaatagaatggacaagatctctttgcacatcttctggtaaactggttgacagcccttgaacatagacttcttctgtatttcgtccctcaggctctaagaatagttgatgacgctctttgtcagcaaaacggacaattttatcctcaatcgacggacaatagcgaggacctactccctttacaacccctgtaaacataggtgcccggtgtaaattattctggataatttcatgactatgcccattcgtgtaagtcaaccaacaaggaacctgatcctttacataatcttcatcacgcgatgtataagaaaaatgatttggagcttcatctccaggttgaatttccgtttcgtcataattaattgacgatgcctttacacgaggtggtgtccctgttttgaaacgtccaatttctaatcctagttgtttgagattatcggccaaattgatagaagctagactatgattaggtcctgacgaatacttgagatctccaatgataatttctccgcgtaaagctgtcccagtagtgacaataacagcctttgccccatactcttggtgagtcgcagtccttacaccaacaaccttaccattctccaccaaaatctcatcaatcatagtttggcgaagagttaaattttcttggttttcaaccgttttccgcatttctttggagtaaagttctttgtctgcttgagcccgaagtgcacgaaccgcaggacctttaccagtattgagcattttcatttggatgtaggtcttgtcgatgttcttcgccatttctccaccgagagcatcgacttcacgcacaacaatccccttagcagaaccaccaatagagggattacaaggcataaaagccagcatttcaatgttaatagtcgcaagtaagaccttacaacccatacggctagcagctagagaggcttctactcccgcatgccccgcaccgattacaatgatatcgtattcttctataaagttataattcattctatttctcctatttctcaagatggatgtgtcgtgattttccgtcccagtctggtagggctgattttaaaaaagccggtttcaggtcaacagtatgtaaatcatctaaagcaatccaacgacaaggtaattgctttgtatcttcctgcatgaccaaaggtgcatcttccagcaagtccacaaaataatgaaattcaatgttatggtagtggattccagcttgttcaaagtgattttcaaccacgaaagctaacgggcctactgtagatgtaacaccaagttcctctttgacttcccgaactacagcatcttctgtagtttcattgacttgaatagcacctccgattgtataacagccgtcctcatcttctatgacgaacaagcgattatcttttacaatcaaagcagtcgctctcacaccaaaaacagtagaacctattttcgttcgaaaatcctgttgcctcattttacttcctttcgaaatcacacaaaaatagtcaaaactctgagaagtgcaggacaaaaaagcctgcaacatccatgagctttgaccatcatttctattgcttttattattgtagcaaattgagaaaatttgtcaatttaaatatactaagactgacggattgcttcaaaaactcctttgtcaatctcaactggatcagagaatgcatctagaacaatccctctcactggaaactttcctatcctttctgcagtaaataaacagtccgtaaaaggtatttgcagccaagaaaaacgatcgtaataatctttaggaatatcctgttccgtcaagaaacaaggataaaagtagtcgtctccctttcgtagaatatccggttttagacgaacaccttcttgttcatcactcccatccattaaagaagcattaaagggaacccaaactttagattgcttcaattccttgaacaaagcttcaattgactccgtcgttttttccctcaaatactgtttcttataatcagagatagtctttgtattctctatttttttcttaaagaactgaaacactttcgttcctcctagaaaattctaaatatactgacaaacttttccatcccgataagcattgtcaatcaagccaccgcctagacactcttcaccgtcgtaaaaaacaacagcttgtcctggtgtaatggctcgttgaggttctgcgaaaatcacttctgccttgtcacctttaacgtgtacagtcaccttggagtcaggctgacgatagcggaacttagctgtacactctaatgtaaactcttctggcatatttcgtgtaaagtgaacttgactagcctgtaaacttgttgacatcaatgcttcatggtagaagccttgaccgacataaagaatattttgactgaggtctttcccaactacaaaccatggagcattgtctccaccttgttggccaccaattccaagcccaccccgttgaccgattgtgtaatacatcaaacctgcatgttcacccatatctcgtccatcgatggtcatcattcgacctggttgggcaggaaggtagttccctagaaattctttgaaattcttttctccgataaagcaaatcccagttgagtctttctttttagctgttgctaatccagcttcttcagctagacgacgaacctctggcttttccaaatgtcccaatgggaacatggttttttgaagttgttcttgtgacagctggcttaagaaataagtttggtccttcccgttgtcaacgccgcgtaacatatgaacaatgccatcttcatcacgcgccacacgcgcatagtgccctgtcgctacataatttgcaccgagtgtcatagcataatctaaaaaggccttaaatttgatttccttattacacatgacatccggatttggtgttcgaccagctcggtattcggcaaggaaatattcaaagacacgatcccagtattctttctcaaagttgacagaatagtaaggaatgccaatttggtctgcaaccgctgctacatctttgtaatcttctgtagctgtacagacaccattttcgtctgtgtcgtcccagtttttcatgaagatgccgatgacatcgtaaccctgttgctttaataataaagctgttacagatgaatccacaccaccactcataccaacaacaacacgtgttttcgagttatcactcatagatttctcccatcttttcgtttctcacgattgaaggtcgtggtttgcttcaacgattgaaggtcgttttgagcagttaccattttaacacgctttatattagaaaacaagcatcttagtattctttttgttgatcaggatcgatgggtttacaagtctgtaaatttaaaaagagtcctattaaagaactcttttcaaacgaatttaataccagccatttgctaaccagaaatttttagctgctgaccatgatccataacggttgacaacatattgattggccactttttcttggtttgcaggtgataaatcaccattcaaataagtgatagtcaattggtaacgaccataatattggccattttgtgctgtataactaccacttgactctttttgggcaatccattccttagcagctgcatcttccgcattcaaaccatctgaagcagagacagtagttgttgcttgtgtagtatcagctttactagcaggagcttgctccgtagttttctgcgttgtattttcatcttcaatctcaagaacttgaccaactgagataaggttcacattactaatcttatttttcttagcaattgcatcaaccgttgtgttcttctctttagcaatagctgataaagtatcacctgattttacagtataagaatctgcattcgctacaattggaaggaaaagtcctgcaagtaaactaagtccaatcattcgtttcatcatttgttttttattcattattatatactcctttattggtatacctctatactacacaagaaatatttcatatttattgaaataatgtgtcaaatatttcagtcagatgttagaaatactaaaaatccaggataatataaatgctttaagccccctttaagatttctcagatatttcgggaaaaatagaagaaatcatcagccatatctgatataatgaagtaaagtgatcacaaaggagcagagaatgaactctttaaaattccaatcagtttttgatattattggacctgtgatgatcggcccatccagtagtcacactgcaggtgctgttcgaattggtaaaattgtttcttctatctttggagaggaaccaaaagaagttgagttccaattatttaattccttcgccaaaacctatcgtggtcatggaacagatttagccttagtagcgggcatcttaggaatggacacagatgatcctagaatcccagatagtctaaaaattgcacatgaacgaggcattcggattgtttggtctattcaaaaagaaagcaatgctcctcacccaaacacaacgactattactgttaaaaatgatcataaaacgatttctgtcaccggaatctcaattggtggtgggaacatacaagttactgagttaaatggctttgctatctcgctaaatatgaatactccaaccattatcattgttcaccaggacgtccctggaatgatcgcccatgtgacagaagctctttctcgctatgatattaacattgcacaaatgaatgtgacgcgggaaaaagccggagaaaaagcgattatgattatagaagttgactcaaggagttgtgaagcagctatcgatgatatccgtaaaattcctcatcttcataatgtcaactttttcaaataaggagttcatatgttttattcaattgtagacctcgtagaacaagtaagcacgcaatacgaaggaaacgtcgcagagttaatgattgcaactgaatttgaactaactggtcgtgaacgagaagaagtcctacgattaatgacccgtaatttagaagtgatgattgattctgtaaagttagggttaaatgaaaaccactctcgtagtgggttaaccggtggggatgccgcaaaattagatcgctatatcaaatcagggaaaacgttatctgacttgaccgtcctaaccgcagcgaagaatgctattgctgtcaacgaacacaatgctaaaatgggactggtctgtgcaacacccactgcaggatctgctggctgccttcccgcagttctcactgctgcaactcaaaaattagggttaaaccgtcagcaacaattagattttctactgacagctggggcttttggtttagtgatcgcaaataatgcttctatttcaggtgcagaaggtggttgtcaagcagaagttggttctgcttcagctatgagtgcggcagcattgacactagctgctggaggaactccttatcaagcgagtcaggcagtctgttttgttatcaaaaacatgcttggcctcatttgtgatccagtagcaggactcgtggaagttccatgtgtcaaacgaaacgcaatgggagccagctatgccttcattgctgctgatatggccttagcaggtattgaatcaaaaatacctgttgatgaagtgattgacgccatgtaccaagttggttctagtcttccgactgcctttagagaaacagctgaaggaggattggcagcaacaccgaccggacgtagattacaaaaagagatatttggagaataacatgcaagccttattttttgatttagatggaacattagttgacagttccaagggaattacagagagctttcaacatacattcgatactttgaaggttcctcaacccgatctcaaaaccatccgtagttttatgggaccacctttgatttctagttttgaagctactcttcctgaagctttggtagatcaagcagtgacgatctatcgccagtattatcatgaaaaaggtcaatacaaatcaactctgtttcctcagatagtagaagctttgaaagcattacaagacgaaaacattcctctttatgtaaccacttcaaaacatgaaccagttgctttacagatgtgtcaagatttaggtatcgctaaatactttaaaggaatttatggatcaaattcagatcgtatccacaaagccgatgtcattcgatacgccttgtcaagcaatgaccttccaaaagaggagacagtgattattggggacacaaaatttgacctcattggaggtcaagcagttggtataaaaaccatggcagtcacttggggatttggagatcttgaagagctacttctttactcaccagattttatttgtcactctccacttgatattcttgagacattaaaaaaataggtttacaaattgtaaacctattttttaataaccccaagctgataaaccttgtgagctatatgcattgtatgcagactggatttgatcatcaactgttgcagttgaaccccaacctggcattgtttggaacaacccactagcaccagaagcatttgctgcatttacttgaccatttgattcacgggcaataattgcttcccaagtagaagcaggtacgccagtcatttcagccatacgagcagctgcataagatccttgttctccagcagtattcccatttgatagaacaattccaccatttgttgattgtgcagaagtcactgcagcatttgctgcataagttgtttgtttttgagcagtttgtgctgttgcagttgctgtaggtgcactttcagcaggttttgcttgctcttgtggagcaactttatcaatcatagattttgaacgctcacctaactcaataatttgtcctgcatagatcaaatcttcattggtcagattgttagatgcaataatattttctactgaagtgttattttctagtgcaatttttgatagagtatctccagacttcacttcgtaagtttcagcattcactgtagcaataccagaaatgaaaagtgatgctgctgaaagtagggaagtgactgtccattggaactttttactgttcatgaattctattctcctttcgaacataattctatcatacacacaaaatgttacagtttattgtagaatatattacaaatgttacaagaatatgtgaatttaatgtaaaaagcgctttgtatagcgctttttccttatttttgaaccaatacaactagctctatccattttttagataaaaaactatcaacatgagacacagaataacgagcaatgctagggtatcttttactccccactgcagagtccgatagcgtgttcgtccctcaccgcctttgtaccctctcgcttccatcgcaattgctaatgcatctgcgcgtttaaaactagaagcaaatagaggaatgaggatcggaataaaggaacggatcctttttaatagatttccttcaccaaaatcaacaccacgcgccctttgcgcattcatgattcgattcgtatcatctactaaggttggaacaaagcgcaaactcatagatagcattaacccaatctcatgagccggaaccttaataatttttagtggtgtaaggatcttttcaacagcatctgctaaactcaatggtgtcgtcgtcactgttaaaatcgtcgaataaaaaataattaaaataaatctacaaaatatgatggcggcttgcatcaatccttggtcggttaatttaaaaaaccaccattgatacaaaatagttccttgagaggtcgcaaataattgaaaaatagttgtaaaggcaatgataaaaatcattgattttaagcctttaatataaaaactaaccgaaatcctcgttagatacattaaaacaaaaataaaagcaaagagaagaacatttgtctggatattatttgcccaaaacagaagaaatatgaataaaaacattgagagcaacttcccacgaggatctagttggtggataatggagtttccaggaatataccttcccaaaatcatattattcatgaagtaacagctcctttagttcctcaattttgattggtagtctgtccagggaaagtcctcttcgtttcaattgaagagtaaaattcgtaatttgtgggactcctaattgaagtttttgtaaatactcaacctgttgaaatatttccctgggggatccgtttaggacaagttttcccgcttctaaagcaaatacggtatcagcaaaatttgctacatcatccatcgtatgagttaccagaactagggtcatcccatttttatgtaatgtctcaaacagtgccatcaattcctttcttccagcaggatctagccctgctgtcggctcgtccaatactaaaatctctggttcgatagctaaaatacccgcgatcgcaactcgcctcatttgtccaccagatagttcaaatggacttttatcatagatagactcttctaaaccaacgatcgctaatttttctttggctatttcctccgctttgtccttaggtaccccaaaattttgtggtccaaaggctacatcagctagaacggtttccgcaaatagctgactttctggaaattgaaaaaccaaaccgactttttttctcaggtacttcatttcttttggctcagaatgattatctaaaacaaaatcttcaaattgaatcgttcctgtagtcggacgcagtaaaccatttagtaattgcaacaaagtagacttgccactaccagtatgcccgatgatggctgtataagatccattttttatttccaaactaatatcagaaagcgcctgcccttcaaaaggacttccctcttgataagtataatagacattctttaaagagattcccatagttggtctaataactcactttctgttagataatcctgttttagcggaaaatgtgagctgagagattcttgaacctgcttactaaaaggcttatctaatccaatctcattcagatcatttcttgaaaacaattcccgcggtgtcatagaagactctagttttcctttttgaaagacgagtgttcgatcacttaaggcaatttcggttaaatcatgggtaatagaaataattgttaattgaaactttttctgaagttctctcattaccgccattagatcctctctaccttctggatctaacatactagttgcttcatcaaggataataatagttggtctcaaggcgataatacctgctatggccacccgttgcttttgaccacctgacaaacgagatggttcgcgatctttaaactccagcataccgacttgctcaatagccttctccacacgttgaagcatttcttcccgtggaattccttgattttctaaaccaaaggcaacatcatcttctactgtcgcaccaacaaattggttgtcaggattctgaaatacaatcccaattttactacggatttcccatatggtttcacgagtcagttgttttccatcaacgtaaatctcaccagactcagcttccaaaaggccatcaatcaggcgtacaactgtagatttcccactaccattgtgtccaacaatcgaaagccactctccttgtttcacgtgaaacgaaaccgtgtcaatttgatactcttctactgttttatcgtatcgaaaggatacattttttagctcaatcatctgtttcatttatttaaatgtgtctttaaagagatagctacttcccttaaagtagtcgtaaccagaataaattgtgaaaatcaatgcaatataaagcaacacttgccccggaagtgtccaatggcaaagcaaaaagataatggcaaacatttggctaaaggttttaatttttcctggcatggctgcagcaagaactgtaccacctgtctcaacaagtagaagacgcaaaccagtaacagctaactcacgacaaatgataacggctgcaatccaagcaggaaccatttttaattcaatcatcatgataaaggctgacatgaccaataatttatctgccattggatcggcaaatttaccaaaattactaactacattccattttcgtgcaagaaagccatctaaataatctgtaatactagcaattgcaaaaataactgccgctacaatatgtcctaagtaagagtgacttaaacttaaaatggcaataaaaataggaatcatcacaacccgaattaatgtcaatgcattaggaatattttcttttttcatacttcctccaaaaaataaactatctttacatctattttacagatgctgtaaactcataaaaatatacgatataaatcacaaagccaagaatggcaaaactaactagtagataatacaggattggtaaccagctcgctttctgtcttaattttcttgaatgaagctcttcgtcatctacaagtatttcttcatcaaataacaattctttcccttcacgaaaagctgtcaataggatggactcatctaatcccaaagcccatgctaactttttaagatagatctgagcgtaaaagggactcggtaatagatcaaactcatcgttttccaacgcttctatataaggaatttcaatggctgtcttatttgacacatcctgtaaacttaagtgtaaatttactcttgacaatcttaacacttgaccaatcgttctcttcttcatgttttcccttcttgatacattgtttactacttttgaaaaatcatataatcaaccatctcagcctggtcgatgaactgacgccctaatttgatgatatcttgtaaactaataccttgtaaaatctttggaagatcataagaagtgctaccatctgaaaaatattcaaactgagtggcactatactcaagcgaatttaaaccttgtaagaaatcaccaaacatttcgcttttaatcgtatccaaatgttcttgattcacatctggatccttctcaaattgtttgatggctgacctaaattgatgggataaggacaccggttcttgagtatccattgtcaaaataacgaaatgaaataattcctcaacctcgacttcaagtgtcaatgagttgtcaatcttcccagcttcatataaactttgaaaccgttgcgaagtccaaccaaacatcatcgaaaatagtaatttcaacatcaatttataacaaaatatttcctcttccttaatgatatcatttcctcgaattccaattgccaacttcggagtagcaacttccattctacaagattgattcaatcttacttcatttttttctacaggaaaacgttctaactccacagaaggacgaggagaagtcagatcatatttctttactacttgcaatacttcatcaacatcaaaatttccgatcactaataaatgcatttgagagggatgatagaatagatcaaagttttcacggagattatctattgtaatgtcagaaatagactccctagtcccagcaatatcatctgctaacggtgttccaggatataaattttctaaagcaccaaaaaataattgatagtctggactatcttggtacattccaatttcttgttgaatgatttctctttccttagatacagatttttctgtaaaggaagcctttgaaaccatctccaataacaattgaatattctcagggacttttgaagttgttgagaaaagataacttgtctttgtaaagcttgtaaaggcattactttccgatcctaaatgaacgaatttttttaaataatcttgaccattttcatcttcaaatactttgtgttctaggaaatgagcaattcctgcaggatattgcctttcatcaccattcactagaattcgtgtatccactgagccaaacttagttgtgattattccataggtttcataataatcttctttgggaattaaatgaatagtcaacccatttgacaagcgtgtaaagtaaacttgctcaccaactgattcataatatttttctttaattttcaatctttacactactttccttccataaaataaacagactgtaaattaattgtttttgccacttcaataatttcttctctactaaccttatcgatggactctaaccactcttctaaagaaaggactttctttcctaggatcgttttcagatattccctttcaatcaaggtattttgccgatcctgtgctaataaggtcgtattcaccaacatttcttttgtcaattgaagctctgactctgtaaacttgcctcgttttaaatcattcaactgtcgcataatcaaggtcattactttcgtacgagattccttatcaatacctgcaaaaaccctcatgaagcctgtaaaaacatcaaaatggcttgagatagtataagcaaggccttctttctcacgtattatttgaaaaagtctcgaatgcgagaaagctcccagcatcccatttaatacaactagagggatatggagagattctccatactgggtagaaaaatgataacctaattctaaaatagattgttggttttgtttttgctctaacttttctcttacaacatttgtaaaaggttgttgataggtgacagacaaattgttatcacgtggcttgaattcaaactggttcactcgatccacaatagcgacctcattaaagtcacctatgaaaaagaagtcaatgttatctaattggagcatctgatgaaactgttcaagagaactttgagctgtttcttgtctcactaaatcaactttccccaatcttgacatcccgattgtttcgtcttcaaaaaatagttgattcaattgcccatgtgcataataataaggctcttcaatttctgactccaaatcggaaatcgtatttttcttttcaacatcaaatgtatcactgtcaaagtgatcttctactaccaaaggtgaaaagaagatagtttctataatgtccaaaacctcatcagtaagaacatttttcttgctcaaaaagtcatcgcgcacaaaggaaatattcaaatcaacataatgaacacgccccctcttagagattgaggtggacaattctaccccgtatagactcgctaatttttcacggaataattgtgaagttggatatttttgatttgcagtttccatcatacaggctactaaaacacgcgcagccacggtattttcatctaatggcgatgaaaaacggaccttaattttattggttttaaatttttttgattgaagaaagtgaagattcacgccctttactaattccattttcatcctcgttctactcaatagtaactttcattataacacgaaatcacactaaaatcctaattcaaactgtgaaaaagctcctcaaatcactcaacattctctaccctagaaaaactaaaaatatggtataataacacgcaaagaggtgaactatgaattacaaattatttgatgactttattacattacaagcgatcttaaaagaactcggtattatacagagtggtggggcaatcaaagcctttcttcaagaaaaagaagtctttgttaatggtgaattagaacaacgaagaggccgtaaacttcgtgtcaatgatcaaattgacattcctgaactgagcatgactatcaccattcttgaaccttctcaagaagaaatagaagagcatcttaaagagaaggaagaaaaggaacgtgttgctaaacttgtcaagcaactcaatcaacaacaaaagaaacaaccgacaaagactaacaaaaaagaaaaagcaattcgctttcctggtatctcctaatgtggttaaaacagttatccattcaacattttcgtaattatcaagaacttgaagtcgagtttcatcctggattaaatattttcctaggtcaaaatgctcaaggaaagactaatattctcgaatcaatttattttctagctttaaccagaagtcatcgaacacgaaatgatagagatctcatctattttgaatccaccgattttaaagtttctggtcaattacaaagagaaactggtccccttccattagaaatttccttgacaccaaaaggtcggataactaaggtaaatcatttgaaacaagccaaattatcgaactatattggccatatgaatgttgtccttttcgcacccgaagatttgcaactgatcaaaggatcacctgcagggcgtcgaaagtttattgacattgaattaggtcagatgaaacctctctatttatccgacttatctcaatacaaccatgtactgaaacaaagaaacagttatctaaaaaattcggaaaaaattgatgctacatttttggaggtcttagattcacaactagctagttttggaagtcgcgtcatccatcatcggcttgagtttattaaaaaattagaagctaaagcaaaagaaaaacatactcgactttctgacaacaaagaaaacctatcaattcaatatcagtcaactgctttttctgaagaaggaaatgatatagaagagcagtttctctctatgttggaaaaaaaccgtcagaaggatatttttaggaaaacaacaagtattgggcctcacagggatgatttggcattttttatcaataatatgaatgctacctttggtagtcaaggccagcatcgaagtgttgttctctctctaaaattagcagaaatcgaattgatggaagaaatcacaagagaaaagcctattttattacttgacgatgtcatgagcgaacttgacaattatcgtcaacttcaactacttgaaactatctctaataatattcaaacatttattacaacgaccactctcgatcatttaaaagaactgcctgaagagttgaaaattttcactattcaagctggtcatatcaaaacagcatcttgacaatattgtcaagatgctgttgtttttatttacaaatgtgtaaatttattgtgctgagtagttaggagcctcgtttgtgatttgcacatcatgaggatggctttctttcaatccggcaccactcatttcaacgaattgtgcatgatcatgtaaatcttgaatggttgctgcaccaacataacccatacctgaacgaataccaccgatcatttggaagaccatatctgctacagaacctttataagcaacgcgtccttcaattccttcagggaccaatttattggcttcattgacagatccttggaagtaacggtcgctagaacctttcttcattgctgcaatagatcccataccacggtatgttttaaatttacgaccttggaagatttctgtttcacctggtgcttcatctgtacctgcaagcattgagccaagcataaccgcgtttccaccagctgctagtgctttgacaatatctcctgaatacttgataccaccatcagcaatgatcgtttttccatattcacgagctacagcggctgcgtcataaatagcagtcacttgaggaacaccaacccctgcaacaacacgagttgtacagattgatcctggaccaattccgactttaactacgtctacccctgcatcaaataatgcacgagcaccttcagcggttgcaatatttcctgcaatcaaggtacgatctgggaagtgggcacgaatttctgcaatcttacgaagaacacccgcagaatgtccatgagcagtatcgatgacaattgcgtctgcaccagcttcaaaaagagcttctgcacgttcaaaagtatctgaagtaacccctacggcaccagccacaagcaaacgaccaaattcatccttagccgcatttgggaactcaataactttttcaatatctttgattgtaatcaagccagaaagacgaccattttcatctaccaatggtaatttttcaatacggtgctcttgtagaatgcgttcagctgtttccaaatcagttccaaccggtgcagtcaccaaattttcactcgtcatatgatttgaaatgggttgattgtaatcagaaataaaacgcaaatcccggtttgtaaggataccaactaatttacgattttcaagtgtttcaacaacaggaacaccactgattcggtatcgtcccatcaactcatctgcttctgcaattgtatgagacggagtcaaatagaacggatcaataataaccccattttcagaacgttttactttgcgtacttcatctgcctgttgctcaattgacatgtttttatggatcacaccaagtccaccagcacgtgccatagcaattgccatttgactttcagtcaccgtatccatagcagcagtaatgattgggatattcaagcgtaaattacttgctaattgtgtacttaaatctgcatcattaggcaatacgtgactttctgctggaatcaaaagcacgtcatcgaatgtaaaccctttttttaaaaactttgtgtcccaattagacattagctggatcctcttttctttttatttgagcaaggctcgaatttttattgttaatatcataccattctatggcaatttgtcaatcatttattggtaaattatcaatgaacagtaagaaatgttcgcttttaatgaagtcgttttattttttaaaataggtaattcccatcgcagattttacttcatccagtgtttgagctgctacatttcgagcgcgctcacttcctttttcaagaatagagtagacctcacccatatcctttgcaaactcaagtcgtctttcacgaattggtcttaattcacgatctaaaatttctaaaagatatcgtttggtctttacatcaccaagtccaccacgttgataatgttctttcatttctgcaatttcagctacatcttctggacggccaaatacatccaggtaatgaaataccatattgccttcgatttttcctggatcctctactttaatatgatcaggatcagtatacatactcatcacttttttctttaaagtatctgcatcatcagctaggtaaatgccattattcaacgatttagacattttagcatttccgtctaaaccaggtaagcgccctgctgcttcgttttcaggataaatcccttccggttccaccaaagtatctgtgttgtaagcatgattaaaggaacgaacaatctcacgagtttgttcaatcattggcttttgatcatttcctactggaacaaaattcgctttaaatgctgtgatatcggctgcttgtgaaatagggtataccaaaaatcctgttggaatactttcaccaaaacctttttgagaaatctcagtttttacagttgggtttctttcaagtcgagccaaagatacaagattcatgtaatacatagtcaattctgctaattcaggaatctgactttgaatgaaaatcgtaactttttcaggatctagtccagctgccagataatccaaagcaacattaccaatagattctacaatcgtttttggatctttcgcatgatccgtcaaagcttgctggtctgccaaaaaaacaaacatattatactcatctttattttgtagcaagacgcgattttttaaagaacctacatagtggccaatatggagttttcctgtcggtctatctcctgtcaaaatgatgggttttgtcatactcttctccttaatcgttatccctatcattatagcactttctagttgaaaatgttagtctatcctctatgtttataaggaattaacactttactgaactgtcaatttcgtttacatcattgtaaaaacaaattgacagtaaaaaagttgaattttcccctattttctagtaaaatgaagacattatagaaagaggagaaaatcattgcttacagtatcagacgtctcactacgttttagtgatcgaaaattgtttgacgatgtcaatatcaactttacagaaggaaatacatacggtctcatcggtgccaacggtgctggaaagtcaacctttttaaaaattttagctggagatattgaaccaacaaccggtcatatttctcttggccctgatgaacgtttgtctgttttgcgtcaaaatcactttgactacgaagatgagcgggtcatcgatgttgtcattatgggaaatgaaaagctctacaacattatgaaagaaaaagatgctatctacatgaaagaagatttctctgatgaagatggtgtccgtgcagctgaactcgaaggtgagtttgccgaacttggtggatgggaagcagaaagtgaagcatctcaattgcttcaaaatctaaatatttcagaagaccttcattatcaaactatgagcgagttagccaatggggataaagtgaaagttctcttagctaaagccctttttggtaaaccagatgtccttcttttggatgagccgaccaatggattggatattcaatccattacctggttagaagattttctgattgattttgaaaatacggttatcgttgtatcccatgaccgccactttttgaataaagtctgcacccatatggcggatctcgactttggaaaaattaaactttacgtcggaaactatgatttctggaaagaatcttctgaacttgcagcaaaattacaagcagatagaaatgcaaaagctgaagaaaaaattaaacaattacaagagtttgtcgcacgtttctcagccaacgcttcaaaatcaaaacaagcaacttcgcgtaaaaaaatgcttgacaagattgaacttgaagaaattgttccatctagtcggaagtacccattcatcaactttaaggcagaacgagaaattggtaacgatctcttgacagttgaaaatctttctgtcaagattgatggagaaaccatccttgacaatatcagctttatcttacgtcctggtgacaaaaccgcccttatcggacagaacgatattcaaacaaccgctttgatccgtgcattgatggatgatattgaatatgaaggaactgtcaagtggggagttacaactagtcgatcatatctaccaaaagacaacagtcgtgattttgcaggtggtgaaagtattctcgattggcttcgtcaatttgcaagtaaagaagaagatgacaatactttccttcgtggtttcttaggacgtatgctcttttcgggtgacgaagttaacaagtctgtcaacgtcttgtcagggggagaaaaagttcgtgtcatgttgtctaaattgatgctcctcaagtcaaatgttcttgtactagatgatccaaccaatcacttggatttggagtctatctcaagtttgaatgatggattgaagaattttaaagaatcgattatctttgccagccatgaccacgaattcattcaaacactcgccaaccatattatcgttctttcaaaaaacggcgtaatcgatcgtattgatgaaacctatgatgagtttcttgaaaatgaagaagttcaagcaaaagtgaaagaactttggagtcaatcataaaaataaagagccctgaaataatgatttcaggctctttcagtagaaatatatgaataaaacaaagctaaaaacatccctttttatagtatcttctttcctgattccagctatcatgatgttctttatttacctctcgcaaggaatctactggaacagtgatacatcccccttattaggagatggttatcatcagtatgtcatttttgataccacacttcgaaatattttacacgggacagatagcctattttacagttttcaaagtggactaggcattaatttctatgcactcagtagctattatctaggaagtttcttttctcctcttgtctacttctttaatgcacaatccatgccggatgctgtttacctcatcactcttcttaaatttggagctattgggttaagcacttatattagtttacatggaatgttttctaaaattcctagatccctggttcttaccctttcaacctcatttgctcttatgagctttgctatcagccaaattgaaatcaaaacttggctagatgtttttatcctagcaccattaattctttatggattcaaaaaactcatttacaatgagggagagattctctactttatcagcttaaccagcttgtttatccaaaattattattttgggtttatgatgtctatttttcttattttatggtacttgacacaactgtcatgggacatcaaagtaattggaaaacgcttctttcattttgtaattgtatctcttttatcagttataacaagccttgtgatgttatatccaaccttcttagatttacgcactcatggagaaagtttttcaaaggttgacagtatctttacagaaaaaagttggtatcttgacgtatttgcaaaaaatttcattggaagttttgacactactaaatatggatcaattccaatgatctacgtgggattatttccacttctattagcgatcacctttttctttgtaaagtcgatcaagtttcacgtgaaactttcttactttatactcttgaccattcttattttgagttttcgttttcaattattagatctcctttggcaaggtatgcacgcgccaaatatgtttcttcatcgatactcttggatcttttctttgacgattattctgatggcaggagaagtactaaatcgaatagaggagatcacttggattcgttttagtcttgctaatttcctccttattctaggatttggagcaactgtcctttacagcagtcactataaatttttagatgctgtcaattttattgttacttttgaatttttaattgctttctatttggtctgtttaggatttatcctaaaaaagataccgcctagacttttctatctttcgatcctttttttctccatctttgaattatcggtgaatagttattatcaaatggaaggaattgcgaatgaatgggtctttgcttctcggtcatcctatgaacgagacttaaaagccatccaatccttagtaagagagaagacagactctaattatcggactgagattctacagccacaaacgggcaatgatagcatgaagtatggttataatggaatttctcaattttcatctgtacgaaatacggatgctagctcgacattggacaaactaggatttaaatctgaaggaactaacctcaatcttcgataccaaaacaattctattttaatggatagtctatttggtgttcgctataatttaagccaacaacctgttcaaaaatttggatttaaagagattgcaaccaaaaatggagtctcactttcagaaaacgaatatgccttaccaatcgcctttctgtcagcaaaaccttataaaaatacttcctttacgaatttgacactggataatcagacacgattcatccatcaaatcacagatgaaaaatataaattttataagaaattaaatattctctcgcctacttcacaaaatactacatcttcgttgcaaactgcaaaaattgaagaagatagtcatctatcctacgcaagtattcaatatgaagtaacggttcctgcccatagccaactatatgtcaatgttccaaatttacaattttcaaacgatgatcggaaagatattgaaatcagctacaatggacagactcaacgctataccattgataatgcctttccattcttttcgattggccattttgacacagaggaaacagttactattcgtatgagttttccagaaaattcgacagtctcttttgatacaccagaattttttgctctggatcttgaccaatacacacaagctatcgctagcattcgtcagcaagaagttgctattcacaaaaagaaaaacaaattggtagcagcctataacgcaaatagagacactacccttatttttacactcccttatgataaaggctggtcagctaaacaaaatggaaaacctatcaaaattcatcgcatccagaaaggattaatgggagttcgtgtttcaaaaggatccggaacagtcaccttaacatttgttccccaaggcttcattgaaggactcattgcctttttcgttggaatcattctcttttttctctacgaatggagacaaataaaaagacgaaaaagttaaggaatctaaccatcggttcacttataaataaaaggctaggatagtaattatcctagcctttttcaaaacaaaaaaacacccaaatgggtgctatactagctccgccagtaggactcgaacctacgacatcatgattaacagtcatgcgctactaccaactgagctatggcggaatgagatatagtccgtacgggattcgaacccgtgttaccgccgtgaaaaggcggtgtcttaaccccttgaccaacggaccatatattcattaacagaacatatcccattatatcaaaatttaactaattgtcaagcactaaattctaaattttgctcttcaattaattttttggcacgtttgatattgcttcttgagattggacaagaatagccttctttcaacagtagctgtttctttttcttatccattccaatgatcatacttctattcacgataaaagattgatggggactgaaatatctctcctccacatctttctccaagacatctgataaacttcccgcaatttctttttgaaaatttttcccaactaagtttaatttataagccgaaccaacagtttcaatataaagaatatccttaaatggaatttttatctttttatccttaaagtcatactcaaaataatctgtcaaatcatcatttccaatttgaatagtcgttaggtactcaatacactccttaatttttaatctaaataaatcttcattcaaatttttatcaataaaatctaaggcagatactttataacgataggtaatcgaagcgaattctgattttgtagtaataaaaacaataatggcataaggatttgcttctcgtattttttgagcaatttccagcccacaatactcattgtcttggatatgaatatctagaaaatataattggtggatatccgaatgctggatataattttcaaattccgaaattttaccggtagaaatcacttcaagtttaatttctaattccttagcaatttctgcaatatgtttttctacccgtatctgttgagagagctcatcttctaataaaaaaatcttcattcttgttcgtatcctccaatcttcaaaacttgtaaaaaacgatttccttgcaattctgtttctaaaaacatcgttccataatttgctaagatttttctcacattatttaatcctagtcctctattttctccttttgtcgaatagccttcttcatatatttttctaatatcaaaagtgatttcatttgttgtattatgaatcactaagtaaacaatttttgaaatagagaaaatagcaatatgaactttcttttcttctgcttcttttgaagcttccaaagcgtttgtcactagaatcccaacgattctcacgatatctaataaatcaactggtagttgctcgattggttcactcgtttcaaaggtcatctctaccccagcatctcttgcatccaaccagcctcgaatcaaaatacttcgtaaagcagaatctttgatattgaccaagttgaatcctgataatgcttctgtattgatctctttataacctttttccaatacttctctatggattctctgtatttctggaatattttcttcctcaatggctaatgacatagaaataactaaatttcccaaatcgtgacgaaatcccctaacaatagaatagagactttgaatttcagccatataccgactcatttgttgctcagaaaattctttatactccagttctaaatttttacgatactgatctcgctcgattttcatatggaataagctgactacaaaagagaaaaaacaaatcgttgccaacatgctcccaaaatttttatattgcgcttgttcactaatccataaagcaaaattaatcactacaaatatagcaaaataaacacagatgagtctctttaaatatttttcaaattctttctcataaaaaggagtgaaatcaaattcaaataagtcaattaacttcaaaatgattcctaaagagaccaaacgaatgcacatattgtagacaatcgagtaagctgctacaacagcatctcccaacactgaagagacaattatcgtcagaaaagttgctgttccttcaaccgctaaataagtaaaaaaagaataaaaaatggcgcacaagcgattcgtccgattggcataatgataataaggatataaataaaccggccataaaagcatatttaaatcagagagtcgaatatttgaaaataaagtcacatctaaaaatactaagagactttcaaaaagaagaacaaaggtgctcagcagaaagataaatgcaaattgatgttcctgatagattttttcgtccactaatgcaaacgtcagaacaatgatccctcccaagagaaaagacaagattaatgactgaatcacacaaactctcccactttgttttttctattttattatactctagtattattataaaaaaataaaattttatatacaaaaaattataatataaaatagactaaaattaaagggaataggtaaaattgtaatgtttttaatgtttttgttacatgaatgaaaactattttacacaatttatataatctacactttgcactatatagggattgttagttcttttttaaaatattcctaataaatcatttcattactattaatctatagcaaagtatacaaaaattaatagataatgaaaatttatacattttaacataaaagaaaagatgcagcaaaagctgcatctttcatttgatcccagcaggattcgaacctgcgaccgttcgcttagaaggcgaatgctctatccagctgagctatgagaccgaacttacttcattttagcagaaaaaggaaggagcgtcaaggttatttatggtaaggactcccctgttgaatcatgaaagcacgatagatttgttccaccaacactaatttcatcaactgatgaggaagagttaattgaccaaagctcattaataaatttcctctttttttcacttcaggagacagaccaagactgcctccaataacaaaagtaaggtttgaataaccagatgtcataatctggtcaatcgtttgactaaatttctctgaaggaaattgttttccttcgatggctaatacaatcacatattccttatctgaaatcttagagagaattcgttccccctctttttcaaggatttgttgattttcgagttgactagcacgatctggagttttttcatcaactaactcaacctgttctacttttgcaaatcgaccaagccttttaatatactccgcgatcccatcttttaagtatttttcttttaattttccaacggttatcaatttaattttcattcccctattgtagcataattcttcaattccacaaataatccacagctatagaaaggaaatctattctataaagtcctttttaaagccatttctcaactaaattctacaagttatccacaaattgtggataactttagttatttaagatataattaagaaagtttttctatactctagacaatttgatatccttaggaggaaaatatgaaatcttcatctaatttactgaaaaaaattggaaacgtagccctcatttttgttgtaggttttctaggtggtattcttggaacctttttaaccttacaaacctctcattcttctacttcaaatactgaaagtaagcaagtacactcaaccactgttaaaacagcttataaaaatacaacctcaactagtgaggccgtagacaaggtgaaaaatgctgtagtttctgtgattacttattctgattcttcgaatcaagggttatttgaaaaagaagaaaactctgactcacaaatttctagtgaaggttctggggtcatttataaaaaagaaggaaaatatgcctaccttgttaccaacacccatgtcatcaatggtgctaaaaaagtagacattcttttagcagatgggaataaagtgcctggagaagtagttggatcagatgtctattctgatattgcagtcgttcgcattagtgcggataaagcaaaggcagtagctgaattcggagattcaaaccaattaacagtcggtgagactgcaattgcaatcggtagccctcttggaactgattatgcgaattctgttactcaagggatcatttctagccaaggtcgcaatgtgaatttgaaagctgataatggacaaaatatctctacacgcgccttacaaacagacgcagccatcaacccagggaactctggagggccattaatcaatattcaaggacaagtcattgggattacctcaagtaaaatttcaaataatggacaaacttcagtagaaggaatgggatttgctattcctgcaaatgatgttgtcaatattatcaaacagctagaagaaaaaggaaaagtagttcgaccagctcttggaatccaaatgatggatttatccaacctttcaacttctgatttaagccaattaaaacttcctgaaaaaatctctggaggagtactagttcgttcaacacttgaaaatatgcctgcttcagataaattgcaacgttatgatgtcatcacaaagatcgatgatacagatatcgagtcaactgcagatttacaatccgccctctattctcaccaaatcaatgatacaatcaaggtcacattctatcgtgatggaaaacaacaaacaacttctatcaagttgacaaaatcaactgaggatctgagcgattaactttcactttcttgacatacttgtaaacacacctttacgaatttgtaaaggtgtgttattctattcataagatggaaaaattagaaaaaatagcggtaaaggacattcgaaccaatcctttccaaccaagaaaagtatttgatcaagaaaaattagaagaactggctcagtcaatcaaagaaaatggcttaattcaacccattattgtcagaaaatctccaataattggttttgaattgcttgcaggtgaaagacgttttagagcttcaaaaattgctggattagagcttgttcctgcgattattaaagagttaacggatcaagaaatgatgcgacaagccattattgaaaatcttcaacgagaagatctcaatccaattgaagaagctatctcctaccaaaagctcgttgatcatggctataagcacgaccaaatcgctcaatttatggggaaatctagaccctatatcagcaatatgcttcgcttgttacatctagctccctctgttcaagaagcagtcattcaaaatgatatttcttcggctcacgcgcgtgttcttgttcctcttgatgaggaagagcagcgcttttggttggagcgaatcaaacaggatcatttaaatgttcgaacattagaaaataagatcagttcaaaaagaaaacagaaaaataaaaaaacaaaagaaaatttcctactagaagaggaacaacgattgaaaaaaatattaggaacagatgtgacgatacactcctcttctcaaaataaaggaactatccaaatttctttttccagtcttgatgaataccaacgaattatcaacagccttaaataaggctgttatttttattttttatattgacaagcttttccaccataaaaatcttttgtaaatagaagaaaaataaggatattctctagttatccccactttgtggataacttttaaaaacaatgtgaatttaaatccacaacttgtggaaaagtttaaaactataatttaatttcatgaaatttagcctgtggaaaactatttttgtttgtggtagaataggagtacgtatgatttgatacaattcaagaaaaggagggaagtctgata

SEQ ID NO: 213 - DNA, 5562 bp, Streptococcus parasanguinis
  source 1..5562: mol_type = genomic DNA
gataatggctgacgaggtgcagaaacgtggcaaaatgggtctgaaagcatcagaagttggtcttcgtcctgtcgtgctggttgctgacgaaattggctctattgtggcactgatggattcaaaacaaactaaaaagtttgtggctgatttaacggctatcattcagcgggggcgctccgttggggtatctgttattgctagcacgcaagatccctcgactgatacgctaccgcaaaagatacgtcagcaatttgctactaagatacttcttgggtccgctaattctgatattcaaagaatggcttttggggaggttgcaacggttggggacgtggaagatttccgaggtttttatgtgtgcgacggcctgactaaccaacccatgaaattttttgtttgtgacttatacagtcatggatttaacgagctgggagcgtttgaaaaagcctataaaataggctttttacgcgtaaatagttgacataacagtgaattttattatataattgtaatgaaataaagatattaatctttttggagattccgagccttactggaagttttaattttggagattccgagccttactggaagttttaattttggagattccgagccttactggaagttttaattttgggttgtcggtatgacaacccatttttttatgggtgaataaatggctgacttgttagaaatgaagttttatagagtagatacaaattatttaaacaatttgcgtctaattgataatcgtgtacctcttaataaggaatatataggcagttctaaaaagacacggccttatattggaataatgctagtagttgatgggattgattatttggttcctttaacatcaaaaactaataaacgttccacgtacgttaatatgcctatatttgataagaataataaaaaaatagcttatctattaataaataatatggttcctgtacccgaatcatgtagaacttcgattaatatggatgggattcgttctattgacccagcatatcatgaccttcttctgaatgaaattaattatttacgtcctaaaaaggaaacaattaaaaaaaggtgtgatgatgttaggtctgtgaaagtaaagggagaatttagagaagcgataacagaggcaactgctgattattgtctaaatttacttgagttagaaaaagtttatgcttcttattaaaaaaataggagtttctcctatttttttttatttccaaaattcccaccatttttttgatgtttctatcagttttgtatcacgattatagataatttgctgaagatttgctatttgcatatctttagtttttaattgttcttttaatagttctatgatatcgctagtgatatcatagttgctatcattgatattatcagtgctatctgctttgatattgtcttctagaataattctttttataaactcatttacagaaatacctttatctttagctttttgtgtgataaaatctttctcttcttgtgtggtacgtattatgatttgtacttgtttgtttttgctcatgatatcaccttttatatctaaatgatatctctattatatcatttttcttttgtataagacttgacaggattgtttaacctcattgctgcaagtatatagtcggtatctgtcatatcacttaattgagcaaaatggattgtggctttatcttgattccatttttggacgtctaatggttcaaaaaacttttcgaataaggcagttatcatgacgtccatagcttcttttcttgtaacttttggtgcttcgtattgttgttcttctaattgttgctgaaacttttcatttgtttgattgtatgtttcctctatataattttcaaaattttgtcgatactcttggatttcttcgatgtttacatttccttgttttaataaatatggttcaacctcgatggatagatgttctagttgttggtcagtaaataatctggtttcgttacgtccgattgttttcttttttgctgtgtcccaatatccaagtttttggagggctctggtgaatttaattcgtaatttattatgatttttttcgttatccggaatatcatatttttctatttgactgtttacgtaatctgtcaaagttgtatatcttaccatagtaaaaacctctcatttgttcgtcattttattatatttgtatatactattgtatacaaaaaatattagtttgtcaatggtaaaattaaaaaaacacgaaaaaaagataaacaaatgttgacgtgcttaaaaaaatatgttatgattaatttatcaaatagaaagaaggaatccgcaaatggataaaaagatgttgtttatgtcgttcaataaaaaaactggcacaattagtggaggagcagtggacgatttaactgtgattgatggcgctgaatttgcaactgcttttacgttcagactacctcaagccgagttagataggttcgaagcagaaaatgatttgcaatacaatgagcaatatcaaatttataatttcggtggagaaaatcctgctatgttacttactaattgtaagtatgtcagccatgatcaatatggggtatatacttatactgctgacacatgggaatggatttgatttaatattgtttttcgtcggcgcaatctaaaaagcacgatgagacaagcgcaaacgacaaggaggaaaggcgaagccgtaccttgcgtgcgctatcatcgtgctagattgtaaaagccgtacgaaatacaatattaaaaacaaatgtttttcagaggtggggtcaagcgtcctacgcttgtcgggtctgggcagacgcccagagggaaaaagggcttttcacttccccctaaaagtgatataataaaaaaagcctaaagccagcctacgcaactggattttaggcaaaaaaaatgtcttgttaatccgccaagattactcacaagacactctcatttacgcaagactagtataacatttttttgtgatattagtcaaatatcaattatttaaaatgtgagatgtcttttctagagtaagtttttggcggtatgcaagcgctataaatttattttggaaaggacatttttttatatgtcacaattggaaaaactgaaagctctgcaaagtcagagcaacacaacaaacgcaagtcttacgctgtttaacaacgtagtagttgtaaatgtcggagtgaatcctactccgcacttcccgaaacttaaggataagtttggaaacaaggtgaaagatgaaaacggtaaggataaacgttctgaaacatctgacgggctcacatatacatttgtagagtttgggactggcaagatggttaaaattgttttagcagaagataggcaatttgaacttttgggagcctacaaagtcgctgggtttgggtatgatatcaaatctgcaaatatgattttcatcgagcaaaaaggacaaatcgctgactactaactaggataaaagggtactgctggaacttgtttccagcaggtagcccccctcaataatcatgggggctacacgtacagagcaaaatgctcttcgtcccttatatatcaacggtttcagacctttaaaatactacacagtaaggacaagaaatgatatgcaaaaatacaaggtagactggctggctttttcggtggcttttgaagatgaagaacagacgttagaccctcaacttatgaagatattgggctatgatttagcggattttgatgaaattcctgggagatttttctacaactcgggagccacttaccgaaattatgttaatgtgttttggaacgatcctgaaagaccttggcataaaaactcaagtaggacaatgactgttgtttacacggggcagggctcaacagagttggccgaaaaatgggatacagattgggttgctatttttagaactctaaaagaatacggcggaattaattttactcgactcgatttggctcttgatgattatgatgaggcagtaagattctccgatattgagaaaaaactgaataaggggcattatcgctcatctcgtaagtcatacaacattgttaagacgtcggatcaaaacggaaaatcattggggcagacgatttatattggaaacgctcggtcacaaaatggtagccgtgggaatgtgtacgctcgtttttatgataaaaaagcgcagtatgaaagtaagaacgaactatttccaaccgaagtccgagatcattgggcaaagactggtaaagaagtgtggcaacggtacgaaatcagcttttctaaaaaatatgccgttaaaatcatagatgagttcttgcaaggcgataaaatcgacaagatcttcaaaacttctcttcggaatctacttgaaattctaacaccaaagcgtggcgacactaataaaagtcgctggtataaggccaaatggtgggagaaattcctagaatacgatgagacaatggattttagtcttgccgaacgtgatgtgatgcttggtgatttgctggagtggttgcgtgtcgccgttcttccctctcttgctctgcttgagatgataggagatgaacgagggtttgatatttatgatttacttaaaagggctgaaaaatctactgatttttccaaaaagcaaaatcgtctatacgtcaatagtcagactttatcagatgagactataaaccattatttgagtgagtttttagggggtggtaaataatggctacaacctacaaaaagaacgctcaaaacgtctacaaagtgcctttatatgcccgattttggacttggtgggctttggttttagtcttagccgttttgtcttttgtcgttggtcttgttgtatcgattaaaatcgtccaagttgttttgtggtcgctggtcgctatattgacaatttggcgggcgtatgcgctgacagggtcggtaattaaagcggggacaatcggaaaatatatcaccgagaaaaaggcagaaaaagcagtcactaaaagcttgcttgcaactatggcagttaatcgattacaggacacaccacacatatctgttccctccgtgagggtgggcgccagcctaccctcacacataacagttcgcgtggaaaaattagctggtatgtatgatgtagataaactaacggaggatatcaattccagcttcagaaaaaagctgggagcgtatgcagtcacgtctgcaatgataacaacagatggattgttttataagtttttactagaggacgtgggaactgataaaacttggcgaccagcgactacggacgatataaaggctgaaaagtatatcatcaaactacaagaagggatagaggttaatctgtcagaacgggctcatattgcagtatggggcaaaactgggagcaagaaaacaactgtcctttttggaataatactccagcttttttcaatgggtgcagatgtccgctttattgatggaaaagatgagttttctgcttttagtggcttttatccaatagaaaaaatagtctctgatcctgatgatgttttcgggcaattagaagacattttagcaatcatcaaagaacgtcagaa
